United States Patent Application Publication US 2023/0172999 A1 - sequence listing, part 13

SEQ ID NO: 13 - DNA, 2919938 bp, Dorea longicatena (residues 1-1,459,969 of 2,919,938)
  misc_feature (995192)..(995334): n is a, c, g, or t
  misc_feature (1511631)..(1511729): n is a, c, g, or t
  misc_feature (1660257)..(1660410): n is a, c, g, or t
  misc_feature (1757803)..(1757993): n is a, c, g, or t
  misc_feature (1980431)..(1980611): n is a, c, g, or t
  misc_feature (2003607)..(2003726): n is a, c, g, or t
  misc_feature (2065760)..(2065769): n is a, c, g, or t
  misc_feature (2133831)..(2133981): n is a, c, g, or t
  misc_feature (2181048)..(2181191): n is a, c, g, or t
  misc_feature (2243088)..(2243097): n is a, c, g, or t
  misc_feature (2276969)..(2277052): n is a, c, g, or t
  misc_feature (2295954)..(2295963): n is a, c, g, or t
  misc_feature (2296303)..(2296312): n is a, c, g, or t
  misc_feature (2312734)..(2312833): n is a, c, g, or t
  misc_feature (2319263)..(2319503): n is a, c, g, or t
  misc_feature (2326820)..(2326941): n is a, c, g, or t
  misc_feature (2354535)..(2354685): n is a, c, g, or t
  misc_feature (2360950)..(2360959): n is a, c, g, or t
  misc_feature (2371858)..(2371994): n is a, c, g, or t
  misc_feature (2413602)..(2413751): n is a, c, g, or t
  misc_feature (2459335)..(2459502): n is a, c, g, or t
  misc_feature (2513596)..(2513605): n is a, c, g, or t
  misc_feature (2516409)..(2516418): n is a, c, g, or t
  misc_feature (2639039)..(2639105): n is a, c, g, or t
  misc_feature (2641913)..(2642006): n is a, c, g, or t
  misc_feature (2770632)..(2770641): n is a, c, g, or t
  misc_feature (2837028)..(2837113): n is a, c, g, or t
  misc_feature (2840997)..(2841155): n is a, c, g, or t
  misc_feature (2896530)..(2896636): n is a, c, g, or t
  misc_feature (2914620)..(2914629): n is a, c, g, or t
  misc_feature (2914995)..(2915004): n is a, c, g, or t
  misc_feature (2915782)..(2915942): n is a, c, g, or t
aatccattttcccattttttcaagagctactacccctttttgaatcgctgctgtaattccctgtacggataactttgaaccctttccagttacctgaaagactgcttttccactttctgccgatgcctgtgctgattttcttgccatctggactactcttgctttctgcatcgcctgaaggctcttttccacctgctgtttctgcatggatgcctgtgtctttattttctcctgagacagaccggatacttttaccactctcggtgctgctttcacctgccgtttaccattctccttggcaagggcggcctgctccggtttcagcttgattagcaaccggttacatatctggtacgagagaagcaggtgctatcacatccaaattgcctttgtgtgattcagatgagtgtagcaaagacgatatgatatttgcacatccatttcgtatgtgcgagtgaattttctttcttcgccataaattacctttcctttctgcaatatagcctgaacaactttattgtaaatcgaaaggtaatttttttgtataacaatcgacgcgcacccgcaatagcgggtggttaaatgttgagtgaaattccatttttcggaacagcgaaaaactccatctcactcaacaggctaaagcccataacataatagaaagacgaaaatataattttcgtctttctattcacaacaaaactaacaatatggtatcacgagataatatttttttatagtctcaatcctgtatacattacattttgtatcccatgaaacataataaaatcctggaacaactctttggacatcaacatccactacttttttttgtatttctccatttttttgatatattatttccttttttactctcggaatacgcatatcaaaataaataatataaatatgctcacctttaatacattcatgccttcgagccgatcctaaatcatataattcatcaaatgaatttactctttgtcgcgttattatcccatccctcataaatgcaactggcccatatatatttataaatattattcctattataaccagaactattattttttttatatttcttttattcatatcaagaaaatttaattataatgtaatcacttgtatgattaatcggaatggaattccatttttcattatatcgatcagttgtatgttgcgttatataaatagctccatccgaagatttactctgcacaaatgccacatgccatatctcatatgtatcgacattcatatatgcaataaaatctcccggattggcatttttgtttgtatctctcctatttgtatatccaccgccattgtaccctctagtaatcgaccaatattcagtaaatgtatgtgctacattccatgttctttttgcaatgctatttccattccattgccattctcctacaaccaaaggcatccctgcattatgtactatctgtgaagcaaaattagtacaatccgaactatactttccataaacataattccatgtttttgcatatgtttttgcatattcttgagctttgcttatattataacgtccacttgctttagctgatttagatttgtactcattattttttgtatttagtaaatttttaaattcctgattttttttctgcatatctgaaattgtacaatttaaatctgacgtactttcatttatactttctaaattcagcatattatctgtgtcattttcttgtacattcaccacatacatcgaagcatatgccgcaaaatatcgctctgtattctgagttatattatcaacctctccatacaaaatagaatacattaaatccaaatattcttcagttcctatttgaatatttaaattgtttatttcaatataattttgtatttcttcttcgatcatctgaaacgagatattagaatcaaattccgcaggtattttttgtggttcatacattacgttattttcattgttatacgcaaatacattatttttaatcataaataacatacaaagaatagcgaaacttatcaccatcttctgaataatattctttttcatatcttaagtgcctcctttttcatgattttgtatacatagattcatctgatttatcttttcatctgtattaataccataactacacttcaagtgatttttatactatattacatcttttcctccctccatattttttagcacatcgaagtgtgttattatattttttctttattatttcaacgattttatctgttacctttttaaattcgcttatattatctgttaatttatgtgtggattatataatattttttatgtgatgtcaatattattattcattgatttttttatcattccttttattgattattattcgttatttataataaaaaataatcattttcttttcgtcatttataactagattctatattcataaaaatatttttattttcttctttcgtgatactcatgtacttaaactattaattcaattgatttttcaaaaaaatatgtatgtcacaatctatactacataattctccctctttctgtttttaactagcaaataacaccttctcttcctcacacattctaataacatttctatcatttacgacattctcaaagtaatatataatacaaacacactaactttaaacttatatctatcaatgtccaacataaattgcatattaattagaaattttcaaaaacagtaaattcaactgatattaaaacacaaaaacataaaataatagaaaatcatcaataattatgcaactgaaaaatcaacaaatttatttctgtattcttgcatttttgcttcaggcatatataatgcctgtatttgccaataccctttcaaataattattcttcccaaagtatatctaatgccctagtagaacaagtcccttggaagtatcgtacatataagggcaaaaagcaacgaaaactatggtcaattacttatgaaaaatggctgactgattggttaccagcataatattatataattattttacattatatcgattaaaaagtaggattaatccacattttctttaaggttaatcctacttttgttttactaatgaatatttctcctttaatgatattttattttctacttttcaaacatattaacaatcatataactttttaccaactcctcccatatcccataatagctccataatctactgcataatttctctgccgtacttggtcgctggagtttccctcaatcgtgtaaactcgtccaccttcacacttttctactattcctacatggtccgatgttccatcgtgatcccagtcgaagaaaataatcattccggggtatccttgccgataatgttcctagaggaacagaatataagaaggtcagggtactgggaagaattgataatctggaaattgtgctgccggaaaataaactggatgaaatcgtaattacactgggtctggctgaatatcataagctggaaagaattgttaaaatgtgtgaaaaatcaggtgtgcatacgaaatttattccggattataataacgttataccgaccaagccgtacaccgaagatctgcagggacttccggtgatcaatatccgaagagttccgttaagtgatccgctgaataaatggatgaaacgcggagtggatatatttggagcaattgtagcaattattctcttttctccagttatgatcgtaacggcaattatgatcaagaagacttcgccggggcctttgatcttttcgcaggaaagagtagggctgcagaatcgtccgtttaaaatgtataaattccgttcaatgatcgtacaggatgagaaaaaagaaaagaaaggctggacgaccaaagatgatccgcgtgttacgacggtcggaaggtttataagaaaaacaagtatagatgaactgcctcagctttttaatgtccttcgaggggacatgagtcttgtagggccgagaccggaaagaccgcagtttgtagaaaagtttaaagaagaaatacctcggtatatgatcaaacatcaggtaagaccgggacttacgggatgggctcaggtaaatggatacagaggagatacgtctattaagaagagaatagagcatgatctgtattatattgaaaactggacacttggatttgactttaagattatatttttaacatttttcaaaggatttattaataaaaatgcctattagctttaaggagaagtcatgagtaaacgtaataaaaaaagattaaccagaagacagcaggaaatacgaagaaaaagactgaaaaaacgcagaagacgcagaagacttgtaattattttggaattgatcattctgtgtattctgggaacaacggcgtttggcttatttaagctgggaaaaatggaacgcaccaatctttcgaatataaagaacaacggactgaaacagaccggatataccaatgttgcattatttggtctggattcaagagaaaagaatcttggaaaaggaaaccggacagatacgattatgatcgcaagcatcaataatgaaaccaaaaaagtaaagcttgtgtctgtgtacagggatacgatgttaaaacagaacggagaacattatgataaagccaatgcggcttattcagtaggcggacctgagacggcagtcaatatgctcaatgagaatctggatcttaatattcaggattatgtcagtgtcaatttccttgcattagccgatgtgatagatatggttgatggtattacggtaaaattaacggatgaagaagttgtgcatatgaacaactattgtgtagagacttctaaagtaacaggtaagaaatataagaagatcgaaccggcagtagccggaacgtataaattaaacggcgtgcaggcggtatcttatgcgagaataagatatacagcaggcggtgattataagagaacagaaagacaaagactggtccttaagaaaacagcagataaattgaaacagcaggatctggcaacgcttaataagattatagataaggtaatgccggaggtatcaacaagcttcactacaaaggagatattaagtcttgccacaggtgcctttgattatgagctgggcgaaacaacaggtttcccgtttgatctggaaactccggaacagataccgggatacagtggttcatatgtcatcccgaaaggactggaagaaaatgtaataaagctgcatcaattcttatatccgaataaggattatacaccgacggcaacggttacagatataagtaatactttgaatgatatgaccaatgtatatccaaatacaacagaaagcggaacatcacaaaatgaataagaagaaagtagatgtcgtaattccggtatatcatccgggatcagaatttaaaaagctgatggagcgtctggaaagacagacctatgaagtaaaccgtatctttttgatgcatacaacagacggacagagtctggaaagcatgaaggaacgttataaaaatgtgacagttgaagagattactccggatgaatttgatcatgccgcaacgagagacaaaggaatccggcaatcggatgcagatattgtgatctgtatgacacaggatgcctgcccggataacgagtatctggtaagtgaactggtacaggctttggaagaagcaaatgttgcagttgcgtatgcgagacagcttcctagaaaagaaagtacattattagaaagatatacgagacaatttaattatccgccggaaagcaaagtgaaatcttcgaaagatctggaaagaatgggaatcaaaacattcttctgttcggatgtatgtgcagcctataaccgggatatgtatttgaaaaacggtggattcgagaaaaaagcaatatttaatgaagatatgatatacgcagcgaaggttatagagaatgaacagaaagtatattataatgcaaaagcaagggtaatccattcgcataattacaattttgcacaacagtttcaccgaaactttgatatggccgtttcccaggcacagcatcctgagatattccggaaggtaagctcagaaaaagaaggaatgaaactgataaagaatacagtcgcttttttgataaaacagagaaggccatggcttgtttttaaacttttcacagattgtgtagcgaaatatgcaggatatcttcttggacgaaaatatcaaaaactgccgaaaaagattgtattaaaatgcacaatgaatccgagatattggacataaacaggaaaacaggactgaaaatattgaaatttagaaaaaaatagggtaatatgtaaaaaggtttgtgttaatttaggataaatgcggaaaggatatgaagtatggcaagaaatacagggaaaaaggtcagacgaagagggcgtcgcagaaaaagaggctttgcgacctggtctatagggaagaaaataggtgctgtattaggcggaactcttctgggcgtagtagttataggatcagtcattctggcaagtaagatgaataaactgagttcggtgaaactcgatacagataaattaaacatttctgatgaagtaaaacatgaaaaaggatacacgaatgtagcgttatttggtctggattcaagagaaaatgatctgggcaaaggaaatcgaagtgatacgatcataatagcaagtctgaataatgatacgaaagaagttaaattggtatctatttatcgtgatacattattagaattagatgacggaagttataataaagcgaattctgcatattcttttggaggaccggaaggcgcagtatcgctgattaaccgtaatctggatatgaatattgaaaaatatgtaaccgtaaactttaatgcactggtagatgttatcgatgcggtaggaggactggatctggaactgacgcatgatgaagttgtgcatatgaacaactattgtgtcgaaacttcaaaagtaacaggaaaaagttatgagaagatcgagccggaagtagagggtacatatcatttgaatggtgtgcaggcagtgtcttattcccgaatccgttatacggaaggaggagactttaagcgtgcagaacgtcagcgcctggtattacagaaaattgcagataaagcgcagaacatgagtgtcggcactgttaataagatcatagacagtgtatttccgcagatatcaacaaactttacactggctgaaataatcggatatgcaaagaatcttacaaagtataaattaggagattcgattggttttccggctgaaaatacaacggatatgttaaatgaagtaggaagtgtcgtaatcccgaagaccttgtcttcgaatgtacttgaggtgcataaatttctgtttggaagtgatgggtattctgtatccagcacgattgaaggcattgaaagtggtattactgcaaaagcgtcagataaggccaaaagcggtacaacgatcgaggatgatgagacaccgggaagtaaggggtattcggaaaattattccaataattcatccggaaccggtacaacaagaagtacctacggaacaacgggtggaagcacttacggaaccggatattccggaggaacatcgacgggaagcggaacgaccggaagtacaggcagcacttcctcaggaactacgggaacaaccggaggaacagaagggacaacaacaggaggtggaacgaccggagataatgcaggcagcacttcgggaaccactggatcgacagaaggaacggaataaatagtaataaaagataaaggggtaggttacatgagaagaattaaaaagatatttgtaacattcttggcgatatgtatgatatgtccatgtctgtcggtgataacagaagcagcgacagcagaactgcgttttgcggatccgtccactacagtaggagcggaagttgatgtaaagaccaagctgacttctgcttcatcaatgcagtctatggaagcgactttaacgtatgacaaaagtgaattgagatttatcagcggtgataatgcgacgggaaaggatggaaccattaagatttcctggaccggaagtggaacaactgcagaatttaatctgaagtttcaggcattaaaagaaggtacttcgaatatcgaagtgtcaagtgctacgggtactgcggaagacggaacgaacctggaagtaacacagggaagttctgcagttacgatcggagctggcgatccgtctctgattaaggaagagaccagtaccgaagatacaacaacatcgacagcagatggtgccgttgtgaaagtgaacggcaagaagtatgttgtgaccagcgatttttcggaagagatcattccggaaggttttaaaaaaggcgagctgacatttgaaggttcaaagtattctgtgatcacacaggaggcaagtggaatcaatgcaatgtatctgactgaaaaagacagcgatgatgcagatttctatatgtataacagtgatgatggatctttcgcaccgtttgaagaagttgagattgcaaaagacagatatattatcccattgatgaatgatggaaaggtgaatctgccaagccagtatcagaagacaactctgacattaaatggtaaagaatttgacacttggcaggatacaaaagacgcagaatattatattatttatgctttgaattctgacggtgaaaagacaacatatcgttatgatacgacagatggaacctatcagaaatacacaccggaatcaaccggcagttcttcttcagaaagtaagttaagtaacggaaaaggaatatggggaaaaatccttaattttgtagagaatttcctggatattgtagttattatagcaattgcattaatcttactgcttgttctggtacttattgtcacagcagtcaagcttagacacagagatctggaattagatgatctgtatgatgaatatggaattgatctggatgaagaagaggaagcattaaaagctaagaaaaaagaagagaaacaggaaaagaaagcacagaaagcttcaaaacaggtttcgaaaaaagcagctaagaaatatgatgatgaagatgaatttgaaggatacgatgaggatgatctttgggttaaagaaaacatagccaaagccatggaaaaaccaaagaagcagaagagcgtcaaacacgcaacggcaaaaaaagcagctgcaaagggtgtacgttctttagatgagacaggtcctgctatccgtaaacctgtaaagaacattaatcttcaggatacagatgattttgaaaaatttactcctttagatgaagaagagttcgataattttgaaggatattattcggatgatgattacgatatgtttggttcaaatgactatgattatgacgacgatgagttatttgatgcaacggcagatctcttaagtaatcacccggaaaagaagagaagtcatgcggagatggatgacacatttaagatggatgttattgatctggattaattactgaattaaaattttataagaaataaaaccggccgcctgatatcggaaaatctgatatcaggcggccggttttgctgatacttgagcgtgtaagacatgaagattactcttcagttttgagaagatctttcaaagaagaaaactgatatcccatggattcccatttgttaagaagttcatcgaggatttctccgttggttttcgaagtgttgtgaagtagtacaatggcaccgggatgaatacggccgagtaatttgtcaaaagcctcttctttggatggctgggcatcggtaagccagtcaacataggcgagactccagaagaaggtatgatatcccatatctttggccatctgtagattttcggtattgtattttccctgaggcggccggtaaaatcgtgtcatcgactttccggtgatctttttgaaaagatcttcgacatctgaaagctcttttgagaaggtttcctgtgtcgcaatctgtgacatatcgggatgatgatacgtatgattgccgacggtgtgaccttctttttgcatttgtttgatcagatctggattatcctgcagaaaattgccgacgacaaaaaaggtagcaggaacatgatgctttttcagagccgccaggatagaaggggtattgccattttcgtaaccacagtcaaaagtcagataaatcactttctgatcagtgtttctggcatagtaggcatgatatttttttaattcatcgaatgaggcatttccgacgggagcttttccttcctcctgaaaactcaacccccaattttcggtggttgggagaacaaaggaatgagaagaagatataaaagtgcggctggccggagtcaaagttgtttcactggcggggaaaattcgggcaatcaatcctccggcaaaaaaacagaaggaaaagaagaaaaggaggattaatggtttatatctggaataaagggtggaaaaagaaagatgagttttgggtatatggaatctgaacatagaaactccggaaaactttttatacagttatatgatgccataaggaaaaagatgtgcggaaaaggacacaaacttgcaaagaatagggaatgatagtagtataggaacgtagaattattaagaacagatataagaaagaataaatgaaacgggatgaaaacatggccagagaatatgtgaaaaaagataatatgctgagtaaagaaatccgttataaaaaaacagagaagggtatgatgatcactgaatattatggaaatgacagttatgtggtgctgccggatgagatagaaggtgagccggtcacgatactgggagattatgcattttccagaaatctttcagttgaggaaatatggatgccgttggaacttaaagaagttggaagatatgcattttacaggtgccggaatctgagaaaattagtacttggcaacagacttctggatatgggaggtggtgcacttacaggctgccatctggaagaagtagagatatatcttcaggacggaaaaaagagctgtctgaagtcgattgtagaagagatgcggtaccagatgaggatatatctacatgcgcctgaaggaggacaggaagcaaaactactctttccggagcattatgaagaggcggtggagaacacccctgcaagaatactggaaacgcatcatcacggggcaggcggatattatcgtcagtgtttttatgaccatgaactggactatcgaaaatatgatgagatgttttatcatacggttgcggaagacacagaggagacggcagtggaactggcactgaaccgcctgcggttcccggcagaactttcagataagaacagacaaggttatgaagaatacttaaaaaagcacatgactgcggtggcaaaatggacggtgaagcaggaagaggtggaaggaatccggttcctgcaaagaagaaaattatggacagaacaatctttacaggcgggaatggatttcgcggcagaaggtagcaaaacagaaattctgagtatttttatggatatcagaaaggatcagtttccaaagaagaaaaagacatttgagctatagagtatttataaaacaagtagagaagaaaagcaatggacagagaaaagatagaaaataacagaggaaccatagaaaaggaccgcctggaaaatataagccgtaagattcttgttatggcaaggaatgaactgtatatgaagatgcggttcctggatgtagcattatccagtcttccgtttgtacttgatacgggggcggaaggtatgggaacagacggactgtatctgtattatgatccacaatatctcgggggattgttcagggaagaccgagtgatggtgaacaggatctacctgcatctggtgctgcatgggatttttcgccatatgatccgcagaaaaggaagagaggaacggctttatcatctgtcatgtgatattgctgtggaatcgatcatcgatgaattacagtatcggtgtgttatgaaggccaggtcgttcccaagaagagaaatgtaccgtgaactgaaaaaagaaatgaaaacgcttacggcagaacgaatatatgaagtgctgaggaaaaaagcgctgacacaaaagcagcttgaacaactggaggtggatttccgggtagacgatcacagttactggccaaaagctgaggagaaaaaaagacagaatcagattgaaaaccgctggcaggatatcagtgagcgtatggagacagagatggagacattttccaaagaagcatcacagacatccggaaatctgatcgatcaggtgaaagtagaaaatcgggagcgaatggattaccgggaatttttaagaaaattttcggtgttaaaagaagagatgacggtggatccggattcttttgattatactttctacagttatggattaactatgtatgggaatatgccgttgatcgagccacaggaatggaaagaagttcagaaggtagaagaatttgttattgtgatcgatacatcgatgtcctgttcgggagaattggtgaaaaaatttctggaggagacttacggcgtattaagtgaaaacgacagctttttccgaaaagtgaacattcatatcattcaatgtgatgatcaggttcagacggatcagaagatcacgtgcgaagaagagctgaaagaatacatggacaaactggaattaaaaggcgaaggcggaacggatttcaggccggcattctcgtatgtggatgaactggtccgccagcatacatttgaacatttacggggaatgatctattttacggatggccggggaatctatccggcgaaaaggcctgtatatgagacggcatttgtgttcatggaggaagactatgaagatgtagatgttccgccctgggcaataaagatcatcctggaagaagatctggatttctgatcagatgaaataaataacagcaaaagaagggaatacaatggatataaaaagagccaaaaaagaaatcaaagattcgatagaggcatatcttgccaaagatgaatatggagattatatgatcccatcaataagacaaagaccaattctcctgatggggcctccgggaatcggtaagacacaggttatggaacaggtggcaaaggagtgtaaagtcgcactggtatcttatacgatcacacatcataccagacaaagtgcggtcggacttccgtttattgaaaagaagatgtacgatgggaaagagtactcggttacagaatatacgatgagtgagatcatcgcttcggtatatgataagatggaagagacaggacttagagaaggaattctgttcattgatgagatcaactgcgtgtctgagactctggctccgacaatgttacagtttttgcagtgtaagacatttggtaatcagaagattccgacaggatggatcattgtagcggcaggtaatccgccggagtacaataagtcggtacgggattttgatgtggtaacattggatcgaatcaagaagatcgatgtagatgtgaattatgatgtatggaaagaatatgcataccgggcagatattcatccggcgattctggcatatcttgagatcaggagagactatttttaccggatggagacgacggtagatggaaaggtctttgcaacagccagaggctgggaagatctgtcacagcttctgaagacttatgaaaagcttggaaagaaaacggacagagaggttgtacatcagtatatccagcactggaagatcgcaaaagatttcgccaattatctggaactgtatcataagtataaaaaagattatggtcttgagaagattattgaaggtgtctataccagggatacgctggagagacttcgatatgcagcatttgatgagaggttcagtgttgtaaatatgttgatcggccgtctgggaagctgcttcaaagaatatttcctaaaagacagactggttacaatgatatatgaatatctgaagttatataaatccaatctgcaaatggatcttgtcgtctgtgaagccagagagcaatatgaaaaattacggaaagaagaacagatgacaaagcaggacgagcatgtaagaaaacaggtgctggataaactggaatcttacgaacagcttgtaaaagaagaacatctggaaggagaggcagcatttgaacgtataaaagaggtgtttggaaatgaagtggcagagagagaagaactgacagaacgtacgctttccgcattggaacatgcatttgaatttatggaagatgcatttggggacagtcaggagatggtttcttttgttacagaacttaacacgaactattatagtattcagttcttaaaggaaaatgactgtgataagtattatcagtataataagaaactgttatttgacaaacagcaggaggagatcctgccagaactaaatgaagtagaacaggatctgaacactgccataaaatagatgattagtatgtaagtttatatccatgacggattttgcgataaattttccagataatcatggccggaaagctgagcgcaatatatagtgatgatagaattccgacacccccaccgacgatcataagaattaaaatgccaatattcataagtcaaagtcctccttgtcaatgtttttatatattgatgttatatatgatgtggaattttgcttccgggtacattgtatggacttttggtaagaagataaagagaaacggatggatcttaacacggtatgaacaagaatcgttattttcttaacattgttttagcgaaagaagtacatttactttaaagacaacaggtgttaaaataagcaatgaatgtaaacgaagatgatataagacccggggaggtcttaaacaagatgagataaaggagaaatatatatgaaatggaatcagtttcgtctgaagacaacaacagaggcagaagatatcgtcagcagcatgcttgctgatcttggaatcgaaggagtgcagatcgaagataagatcccgcttacacagtctgacaaagagcagatgttcgtagacatcctgccggatatgccggaagatgacggatgtgcatacctgacattctatctggatgaagaagtagacaagcatgagatgttactgaaggtcagacaggaattagaagagatgagaagttatctgaatgtgggagactgtacgatcgaggagtcccagacagaagatgtagactgggtaaataactggaagcagtatttccatcagttctatattgatgacattcttgtcattccttcatgggagaatgtagaggccaaagacagcgacaagatggtgatccatatcgatccgggcacagcattcggaaccggtatgcatgagaccacacagctctgcatccgccagcttaagaaatatgtgacagaagatacagagatcttagacgttggatgtggaagcggaatccttggaatgttggcgttaaagttcggcgcaaagcattcggtaggaacagacctggatccgtgcgcgatcgatgcaacctacgagaatatggacaacaacggaatcagcagagaccagtatgaagtcatgatcggtaatatcattgatgataaagaagtacaggataaggtcggttatgagaaatacgatatcgtagcagcaaatatcctggcagatgtactggtaccgctgacacctgtgatcatccaccagttgaaaaagggcggtatctatatcacaagcggaatcatcgaagataaagaagaagtggtcgtagaagctgtgaagaaagcaggcctcgaagttctggaagtgaaccaccagggcgaatgggtatctgtaacggcaagaaagaattagaggattcgatatgcaacatttttttgtgtcaccggagcaggtgaaggaagaaaagatctacgtagagggcggcgacgtcaatcatatgaagaatgtactccgcatgaagaccggtgaagaacttacggtaaatgacggagaaggcagtcagtacctgtgtgcagtggaatcctatgaagcagatatggcagtgcttaagatactggagaaaaagcaggacgagagcgagcttgcatcaaagatctatctgttccaaggacttccaaagcaggacaagatggaactgatcgtgcagaagtcggtagaactcggcgcatatcaggtaatcccggtggcgacaaagcgagccgtggtcaagctggatgcgaagaaggcgaagaagaaggtcgaacgctggcagcagattgcggtcagtgcggcgaagcaggcaggacgaggtattattcctgaggtgggagaagtatgcacttatgcgcaggcattaaagcaggcagaagaactggacgttgtcctgatcccatacgaactggcaaaagggatggaagagacgaagcagatcatcgcagggatcagaccggggcagtcggtcggcatctttatcggaccggaaggcggctttgaggaagaagaagtagcacttgccatgaaaaccggggcaaatccggtgacacttggcaagagaatccttcggacagagactgcaggacttacgatgctttcggttctgatgttccatctggaagggtagaaacataatctaatactaagaatgaagagtacaggaagtgaagaaatgaaggaagtatatctggataattcggcgactaccatggcataccgaagcgtcggggaactggtgcagaaggtcatgtgtgaagactatggcaatccgtcttctatgcataacaaaggtgtggaagcagaaaaatatataaaagaagcaaaagaaacatttgccagactctggaaggtacaggaaaaggaagtgtattttacttccggcggtacggagagtgacaatatggcactgatcggcgcggcaagagcgaataagcgtgcaggcaaccacctaatcacatcatccatcgagcacccggcaatcatcaacaccgtgcgtttccttgaggaagaagaaggattccgtgtgacctatcttccggtagatcagtacggaagaatccgtctggatgcgttgaaagaagcgctgtgtgaagatacgatcctggtatcgatcatgtatgtgaacaacgaagtgggttccgtacagccgattcaggaagcggcaagtatcgtaaaggcatataataaagacattttattccatgtcgatgcggtacagggatttggaaaatacaagatctacccgaagaaactgaaggtagatatgtgctccatcagcggtcacaagatccacggaccgaagggcgtgggtgcattatacatcggtgaaaatgtaaagatccgtccgatcgtctacggcggcggtcagcagcatgacatgcgttccggaacggaaaatgtaccgggaatcgcaggactttccctggcggcaaagacgatttacgataacctcgatgaaaaagtggagaagatgcgggcgttaaaacagcatttcatcgaaggcgtggaaaagatcgagaatacaacgatccatggtttatacgatgagacgtcggcaccgcatattatcagtgtaggaatcgcagggatcagaagtgaagtgctattacatgcgctggaagataaaggaatctatgtgtcatccggatcggcatgtgcgtccaaccatccgcagatcagcggtgtgttaaaaggaatcggggcaaaacaggagtttctggatgcgacgcttcggtttagtatgtcagaatttactacactggaagagattgactatacgctcgatgcactatataatatagtaccgatgcttagaagatataccagacattagaaagttacagataaaagagaaagagatcaggaaaggaatcagaagatgagatttcatacatttttattaaaatatggagagattggaattaagggaaagaaccgtcatctgttcgaagacgcactggtgcgccaggtgcgttatgcattaaaagatgtagacggacagttcgatgtacacaaatcacaggcaagaatctatgtagactgtgaaggagattatgattacgatgagactgtggaacatctgaagaaagtattcggtctggtcggaatctgtccggttgtccgtatggaggacaaaggattcgagaaactgaaaaaagatgttgtcgcatatatggatgagatgtatccagataagaactttacatttaaagtagagtccagacgtgccaaaaagtcttatccgctgaactctatggagatcagccgtgaccttggagaagcgatcctgtacgcattcccggaaagcggaatcaaagtagatgtacatcatccggatgttatggtgaacgtagaagtcaggaatgagatctacgtatattcacagatcatcccgggagcaggcggaatgccggtcggaaccaatggttcggcgatgcttctgttatccggcggtatcgacagcccggttgcaggatacatggtatccaaacgtggagtaagccttgaggctacttacttccatgcgccgccgtatacaagcgaacgtgcaaaacaaaaagttgtggatcttgcaaagaaagtggcaaaatattccggaccgatcaagctgcatgtcgtcaactttacggatatccagctttatatctacgatcaatgcccgcatgatgagctgacgatcattatgagaagatacatgatgcgtatcgcagaacattttgcaaaagaggatggctgcttaggtatgatcacaggggaaagtatcggacaggtggcaagccagaccatgcagagccttgcagcaacaaacgatgtatgtacgatgcctgtataccgtccactgatcggattcgacaagcaggagatcgtggatgtatcagaaaaaatcgatacttatgagacctcgatccagccgttcgaagactgctgtacgatcttcgtggcaaaacatccggtaaccaagccgaatattgatgtgatccgccgttcggaagagaatctgaatgagaagatcgatgagctgatgaaacaggcgattgagaccgttgagatcattgaagtaaaataaatggagtaaaataaatggagtaaaaaagagggctgaacccttaaacaggtcagccctttttctaagtaaatcatttacttttattactgattagtcacaaagatatggttttaacatttccatgatctcttctacgttgtcatcagcgtggatgttcagatcgatcggtttagaaagatctaagctgaagattcccatgattgattttgcatcaatgacatatcttccagatacaagatcaaagtcataatcaaattttgtgatgtcgtttacgaatgattttactttgtcgattgaatttaaagaaatctttactgttttcattggaataccctccttgattcatttcttgttctatagatatattaagagtcagacgaagaaaagtcaaggaacaaattgccaaagaattcagaagattttcgttagatgttacaacaatgtgttaaaataacgttttaaaaagaaaggaacagatatatgaagaaagtagcattgcataatctcggatgcaaagtaaatgcatatgagacggaagccatgcaggaactgctggaaaagcatggatatgagatcgtgccgttccaggaaggtgcggatgtctatatcattaatacctgtaccgtaacgaatatggcggaccggaagtccagacagatgcttcataaagcaagaaagatgaacccggattctattgttgttgcctgcggctgctatgtacaggctaagaaagatgatatcccggaaggtattgatattgtcgttggtaataataagaagcagaatattgttgaaatcctggaaaattatgaaaaagaaaagaatcaggatggtcagcgggaaacatcagacgaacaggaaaaggaaacagagacctatcaggagattctggatatcaatcatgaaaaagtgtatgaagatctgcatttaagtacggcggcggaacacacaagagcttatatcaaggtgcaggacggatgcaaccagttctgctcttactgcatcattccgttcgcaagaggaagggtaagaagcagaagccgtgacagtgtgctggatgaagtgaagacactgtcggccaatggatataaagaagtggtactgaccggaatccatctgagttcgtacggaatcgactgtgacgacaacctgttgtcactgattctggcgatccatgaagtggaaggaatcgaaagaatccgtcttggatcactggagccgagaattattacggaagaatttgcacagacgatcgcaaaacttccgaagatgtgtccgcatttccatctgtcattgcagagcggatgcaacgcaacattgaagcgcatgaaccgcagatacacagcagaagagtattatgagaaatgtcagctgctccgcaaatatttcgacaacccggcacttacaacggacgtgatcgtcggttttccgggagagacggaagaagagtttgcagagtcgaaggcatttgtagataaagtagatttttatgaaacacatatttttaaatattccagaagagaaggaacaaaggcagcggctatgaaagaccaggtgccggatcagatcaaggccgcaagaagcgccgaacttctggaactgaaccgtaagaagcaggcggtttatgaagaaagactgcttggaaccacacaggaggtcctgatcgaggagaaaatcgtgcgtgatggagaggaacttcagatcgggcacacgaaggaatatgtgaaaattggtgtaaaaaatccgaataatcttattaatcagcttgtaaatgtagaaattgaaaaccaattacaaatattgcattgaaatttgagatttaatcatgtagaataaaattgaaatatttttggaggacgtgattatatgaaaaatatgacaaatacccagtttttccaggtagaaagtggaccacagatcagcgcaaaggacattctggagattgtatataaggcattaagtgaaaagggatataacccggtaaaccagatcgtaggttatattatgtccggagatccgacctacatcacaagccataacggagccagaagtctgatcatgaagatggaaagagatgaactggtagaagagatgctcaagacgtatatcgagcataatgagtgggaataatgactatgagaatcatgggactggactatggatctaagacggtaggcgttgcggtcagtgatccgttgggaattactgctcagggagtagagacaatatgcagaaaggacgagaacaagctcagaaagacctgtgcgcgtatcgaagcactgattgaagagtatcaggttacgaagattgttctcggacttccgaagcatatgaataatgatattggagatcgtgcggaaaaatcaatggcatttggtgagatgttaaaaagacggaccggccttgaggtcgttatgtgggacgagcgtctgaccacggtagaagctgagcggactttgatagagaataaggtgaggcgtgaagaccgcaagaagtatattgataagattgcggctgtttttatattgcagggatatctggattcacttgcgcatacgcccctggattaagaggtggattatagatggaaaagattaaattcatgtccgaagagatgaatgaagaagtagatttttatgtacttgaacagacaaaagttggtggggtgtcttatattctggtgacagattcggaagatgatgatgcagaatgtctgattttgaaagacacatcaggagagaaccagtcagagagtgtatacgagatcgtagaagatgatgtagagctttctgctgttctgaaagtatttgaagaactacttgaagatgtagagattgaaaggtagtttggaatgtctatcagtaaagagaagtttaaagaaatgctgagagaaaaggggttgaaagttaccaaccagcgtatactggtactggaggtccttgcagatcatcgtgataagcatctgactgcagaagatatttatgaattagtaagagaagattatccggaaattgggctggcaacaatttaccggacagtgcagctgttactggaaatgcaattggtggatcgtatcaatcttgatgatggatgtgcacgttatgagatcggagaattcttcgatggagaagaaagacatcatcatcatcacctgatatgcagaacatgtggaaagatcattccgttcaaggatgatcttctggaaaatctggaagataagatcgaagagacaacgggatttcatgtgttagaccacgaattaaagttctacggacagtgcaaggagtgccaaaaaagaggcagaaaaatagtacggtaagcacgtggaggtgtaattttgaagagagaaaacaatggaaaaatgcgtatcattccactcggaggtctggaaaagatcggaatgaacatcacagcttttgagtatgaggacagtattattgttgtagactgtggattatctttcccggaggaggatatgctcggaatcgacctggtcattccggatgttacttatctgaaggataatatccagaaagtcaaaggatttgtgatcacccatggtcatgaagaccatatcggtgcactcccttatattttaagagaactgaatcttccgatctatgcgaccaagcttacgatgggaatcatcgagaagaagctgacggagcacaatctgcttcgcagtacaagaagaaaagttgtaagacacggacagtcgatcaatctgggtcagttccgtatcgaatttatcaagacaaaccacagtatccaggatgctgcggcactggcgatttattcaccggccggtatcgttgtgcatacaggagactttaaagtagattatacaccggtatacggtgatgcaatcgatctgcagagatttgcagagatcggaaagaaaggtgtactggcactgatgtcggacagtaccaatgcggagagaccgggatttacccagtctgagcgtacggtaggtattacatttgaccacatttttgcagagcataaagatacacgtattatcattgcaacatttgcatcaaatgtagaccgtgtacagcagatcatcaatacggcatgtaaatatgaccgtaaggtagtcgtagaaggacgaagcatggtgaatatcatccaggttgcacaggagctgggatacttaaatgttccggataagacactgatcgagatcgaccagctgaagaattatccaccggagaagacagttctgatcacaaccggaagtcagggagaatcaatggcagcactgtcacgtatggcagcagatgtgcataagaaagtaacaatcatgcctggcgatacgatcatcttcagttcaaacccgatccctggaaatgaaaaatccgtatccaaggtcatcaatgaactgactgcgaaaggtgccaatgttatcttccaggatgcccatgtatccggtcatgcttgtcaggaagaattgaaactgatctattctctggtaaaaccgaaatatgcaattccggtccatggagagtacagacatctgaaagcaaatgcaggaatcgccaagatgcttggtattccgaaagaaaatatctttattctgaaatcgggtaatgtactggaactcagcgataaggaagcaaaagttgtagacaacgtgcatacaggagagatcctggtagacggcctcggtgtcggagatgttggtaatatcgtactccgtgacagacagcatctggcagaagacggtatcatgatcgttgtactgacactggagaagggaagcaaccagcttcttgcaggtccggatattgtatcgcgcggattcgtgtatgtaagagagtctgaaagtctgatggaagaggcgagaaaagtccttacagaagcggtagaagactgtctgacacaccagcgtaatgcggactggagcaagatcaagcttgtgattcgtgatacgatgaatgatttcatctggaagcggaccaagagaagaccaatgattcttccgattattatggacgtatagaaagtataattataattaaacgggaaatgagccgcacattgtataaaacaggcgccttcgaacgcagtgggcgaagcctgttttgtgcagtgtacggctcattcccttgtagaaactcaagatgaaaaaatgtgtaacagataaaaccgtaacaaatagaacagaggtaggaatactatgatcgtagatgaacgtatggtcacatacatccggtcgctggaacgtccggagaatcctgtcatagaagcaatcgaacaggaagcattagatagtttcgtgccgatcatccggaaggaaacccagagtttcctgaaagtcatgatgttgatgaaccgcccggcgagagtccttgaagtcggtacagcagtcggattttcggcgattttaatgagcgaatatcttccggaaggaagccatatcacaacgatagaaaattatgaaaaaagaattccgatcgcaagaaataatttcaaacgggcagggaaagaagaacagatcaccctgatcgaaggggatgccctggaagtgatgaagacactggaaggaccgtatgattttatttttatggatgcggctaagggacagtatatccactatatgccggaggcagtgagactgctttcggatggtggcatcttaatgtcggataatgtattacaggatggagatatcattgaatcccggtttgcggttgaacggagaaaccgtacgatccacagccggatgagggattatctctatgaattaaaacacagtgatgtgctggagacatcgatcatcccactgggagacggtgtggcactcagcattaagaagaaaaaagaagagaaggagaatcgataagatgagaaacagacatccagaattactgattcctgcaagcagtctggaagtgttgaagactgcggttatgtttggtgcagatgcagtatatatcggaggagaagcgttcggacttcgtgcaaaggcaaaaaacttctccatggaagacatgaaagatggagtgcggtttgcacatgaccatggcgcaagagtccatgtcaccgtgaatattcttgcacacaatgatgacctggagggagcagcagagtatttaaaagaactgaaagaaatcggtccggacgccctgatcattgcagacccggcaatctttatgcttgccaaagagatctgcccggagattgaaagacacgtcagcacgcaggcaaataataccaactacggtacatttaacttctggtggaacctgggagcaaaacgtgtggtaacagccagagagctttcgttaaaagagatcaaagagatccgtgcacatatcccggaagagatggagattgaaagctttatccacggggcaatgtgtatctcttattccggaagatgtctcttgagtaatttcttcacaggaagagatgccaatcagggagcctgtacacatccgtgccgctggaaatattccgtggtagaagagacgagaccgggcgaatatatgccggtatatgagaatgaaagaggtacctacattttcaactctaaggatctgtgtatgatcgagcacattccggagatgatcgatgccggaatcgacagctttaagatcgaaggacgtatgaagacggccctgtatgtggcaacagttgcgagaacgtaccgtaaggcaattgatgattatctggaagatccgaagaaatatgaggcaaatatgccgtggtacaaggatcagatttccaattgtacctatcgtcagttcacgacaggattttattttggaaaaccaagtgaagaaagccagatttatgacagtaatacgtatatcagagagtacacatatcttggtatcataggagagattaaagacggactgtacaggattgaacagcgaaataaattctcggtaggcgaagtgattgagatcatgaaaccggatggacagaatgtagaagcaactgtagaaaaaatcatagatgaggatggaaatgaacaggaaagtgcaccacatccgaaacaggtgctttatgtggcactcagtgcagatgcatcggtatatgatattttaagaagagcagaaaaagaaacagaataatcttatggaaaagaagacagtgattcagtgcaaaaatggaaaagcacagaatcactgttttttgcatagaatataataaaactgccggggagggagccgttgtattgaaatcatttccccaacccctcacagcagcagaagaaaagtattatgtgcaaaaatatacagagggtgatctggaagcaaagcatattttgatagaaagaaatctgaggctggttgcccatattgtaaaaaaatatcagcctccgccggaggaaatggaagatcttctgtctattgggacaataggacttatgaaagctgttgttacgtttgatccggaaaaaagtgcaagacttgcaacatatgcagctcgttgtatagaaaatgaattattgatgcatttccgcggaaagaaaaaatcgtcaaaagaagtctctttgtatgaaccgatcggaacagacagggagggaaatgagatacagctatttgatgtgatcgagatgggagaagaagatgttcatcacaggctcgaaaaaaaagaagatgtcatacgattatatcagaaagttgagtcagaactgtctgcaagagaacgcatagtattgaaattgcggtatggattatataatgaagaagaatatacacagcgcgaaatcgccaaaatgttgggaatttcaagatcatatgtttcaaggattgagaagagtgcaattgaaaaactgagagccttttttccttcttagaaaagtctttaagaaatctttagaattatatggcaattattttaagaatcaaagtctatacttaacaccataagaaagagacatatcagaaggtatgtgagaaagggtggcagttatgaaagtactggtgttaagtggaagatttggaatgggacatgaaatggcagccaatgcaatctgtgaacagttccgtaagcttgataaagatacagaaattgtaaaaaaagatctcctggaagaattatatccacatatcagcaaacttatttttgggggatttcgtctgatggtggagcattgccacggaatatataactttatttataaaatgtctggaaaaatgaaagtagaaatgcagccgagaggagctgcgatttataaaaagttaaagaaaatcctggaaaaggaacagccggatgttattgtctgtacacatccgatgtgtgtaaaggcaattgcatcatataaagaaaagactggactttcgacaccgctggttacatgtattacagatatcagcatgcatccggaatggaaagcagatcagacagatctgtatctggcacctaccagggagattaaggagcatctgatctgtgaaggtacaaaagcagagaatattcttgtaacaggaattcctgtacgtcagcagttcttgaatatggacaggaaacatctggaaaatgaaaaagaagttcgcagagttcttgtaatgggaggcggacttggcctcatgccagatttgagaagattactgggaaaattgcatagtatgcaatctgttcagaccattgttgttacgggaaagaatcataaaatgtacgaagaatgggtgaaccggtatgaggatgtcaaagtactgggatatacagaaaatatcagtaaatatatgcggtgggcagatcttgtgatcacaaaagccggagggatcacgttgtttgaaattcttcacagtcaggtaccgttatttgtgattcatccatttctggagcaggaaatgaacaatgcaaggtatgcggcagaaaaaggatttgcaaaagtggtatggggaaaacacgaggattatattccggaactggaaaaacttctgaatgacagaaaacttctgaaacagatggatgagaatgtaagacatgcccggaaggaaatgatagatgtttctctggataaggcggtagagatcatggaagagaggatgacggcataatgaagaaagcagtaaaggcaggaattataggtgcaggagcacttggatatagtatcattccaacatatctgatgaagtaccactggattatcagagacaaaaagatggcgaaaaaagaagaaaaggttttatatctgacatttgacgacggacctgataccgtatatacgaacaaattactggatcttctggatcaggaacaggttccggcaacctttttcatggtagcggaagctgcacagggacatccggatattgtgaaacggatgaaaaaaagtggatattcgataggaatacattctttgagtcatcaaagtgcaatgctgttcggacctggaaggacgaaaagggatctgaaagaatccaggaagattatgggaaaaatgggaattgacgtaaaagaatacagaccaccatggggacatttgaacctgatgagtttatactgcatcaggaaaatgcatttgcaactgattttttgggatgtaatggcgcaggactggtctgcaaaggagacggcagacagtatctgcaataaaattcttagacgtgtatttccgggagcagtgatatgcctgcatgatggaagaggagaaaatggtgcaccgggaagaacaattgaagcactgaaaaaagcaattccaatgttaaaggcacaaggatatgaatttagaaggattgaagaaaagtatgaaacagcaggaaggtcagagatcagttaaaaaatatattgtgttatttatattgctggtgctcgtagtcatatttattgtattgaaaggtgcggatatagaatctgtatggaatgcaatgaaaaatgcggatccgaaatggctgacggcaggccttggtctggcagcagtgtttaatattgcagaaggtattaatctgagaaaagttttagtatcttttggatatcgggtaagctttaaagaggctatgaaatatgcatatattggctatttcttcagttcggtaacaccatcggcgaccggaggacagccattgcagctatatgcgatgagcaaagataagatccacgtggcacatggaacgatggcacttttaacagagcttacgagttttcagattgcagcatttctgatggaaaacattgcagcgttctggattctgacaggaagaatacacctgaataaaattatgctgatactggcattggttggttatattatgaatctggtttttattgccgcactgatgatcgtgatcgtatctgacagactgaaaagaaaaatcgtaaaagggattcgctttttggttatgaaacttccatttagacataaagagaaaatggaaagtaaaatcaatgatatattacacgattttgaaaattgcaaagatttttttaaagaagatccaaaccttacattacaggtaattggggtgagcctggtacagattatctgctggttcagcgttccgtgggcagtatatcatgcaatgggagaaacaggcagtacatttggaagtctttttttacatcagattatattatatatgacaacagcgcttcttccgtttccgggagcggaaggaatcagtgaattttcttttgtaaaattatttaccggtatgttttcttcggtaccggttgctgctgtagtattggtgaatcgtgggatcagtttttacttcctgttgatcttaagtggaatacttggtgtggtgttaggacgttttaatggaagaagtgcagatcaaagtggaacgaaatacaaactgcaacaggaaacagaaaatggaactggaaaaatattgacataacagaaagaataggatatgatgattgcacatttaacgaagatgaggaatcatatattctgttcttttttcgttttatcctatgcagcaatgcgatgagcagctgcttctttaacggctatttcggccggaatatcaattgtaaatttaatttaataagcttgtaccgaaaaaagccgggtgcaggaatcacgatcgaacctggtggatacggatacagaaaggagtatgtagatgtcgttttgtacagttttatctgcagctgttcagggactgagtgtagagatgatcagagtggaggctgatgtcagtaacggacttccgatgtttcacatggtaggatatctgtcttcggaagtaaaagaagcatcagagagagtgcgtacagcaattcgcaattcgggaatgaaattaccggctaagaagattattgtgaatctggctccggcaacagttagaaaaaggggagcgtcgtttgatctgccgattgcactggcggttctggcagcaatgaattatgtaccggaagaggcactaaaaggtgtggcagtgattggtgaggtgagtctggaggggaaaataagaggtgtgtcaggtgtgctgccaatcgttatggaagctaagaatcagggctgtactgcctgtattttgccggaagaaaatgaaatagaaggaaggcttgtgagcgggataaagattcttcccgctgataatctggaaaaactctgcgcatatctgaacggagatgaaaaagagatacatagaaaaaaacagggaaggtcctccgcacaaagaaatattttcgaaaataaagaagaggattttttagacatatgtggtcaaaatgcggtgaagagggcagcggagattgccgtggcgggaggacataatttattgatggcaggaccgccgggatccggcaagtcgatgattgcaagaaggattgcgacgattttaccggaattgtcattggaggagagcctggagattaccagaatatacagtgtacttggaatgatagataaagagcagcctttgatcaccaggcgtccgtttcgaagtgttcatcataccataacgaagactgcattagttggaggtggaatgacaccaagaccgggagaaatcagtatggctcacggaggtgtgttatttttggatgaactggcagagtttccgagaaatgtactggaagtgttgagacagcctttggaggaacatcagatacatattgccagaaattatggaaattttacatttccggcagaatttatgctggtagcagccatgaatccgtgcccatgcggtaattatccggatatgcagaaatgttcatgtacgccgtcacagattcagaaatatcttggaaagataagtcagccatttctggatcgtatggatctgtgtattgagacaccgaaagtggagtaccgggaactggatatagaaaggataggaaaaaaagaggaggaatcatcggaggtaatacgaagcagagtagtagaagcaaggaaattacagaaaaaaagatacgagggaacgcaaattcgtacaaactctatgcttggaccgggagaaatcaggacctatattccattaggcagtgcggaaagaaagttgatggagaaggcatttgaaaggatggggctgacagcgagaacatatcataagattttacgagttgcaagaacgattgctgatttggattacagtgaaaaagtgacggagaagcatttaaaagaggcaatcgcttatcggtcgttggataaaaaatattggggacgttaagaaaggagaaaagcagatgatctacgaatactggctggcaggaataaaagagattacagatctgaagaagcaaaaactaagagaggtatatggatctggaaaagccatatattatatagaagaaactaagttagataaactgcgctttctaaacgagaaggatgtggcgatattaaagaatgcaaaaaaagatacagaacttgaagaaaaatggagaaggacagaagaaaaaagaatacagtttattccgtactttttaaagacgtatccggaaaaactgaaatatattaccgatcctccgtatgcattatatgtactcggacaacttccggatgaaaaaagaaaaagtgcggcgattgttggggcgagaaactgtacggcgtatggtgaacagatggcattacaatatggaaaaagccttgcagaagcaggaatacagataataagtggtatggcaagaggaattgacggtgcaggacaaagaggagcgttaaatagcagttgggctaaagaaagtggtgtgacatatgcggtacttggatgcggagtggatgtctgttatccaagagagaatataggattgtatatggatatacaggaaaaaggaggaatagtatccgaattttcaccaggaacccagccgtatgcgtggaattttccaagaagaaatcgaatcatcagtgcgctggcggactggatacttattatggaagcaaaagaaaggagcggatcattgattactgcggatcttgcattggagcagggaaaggatgtatatgctcttccgggaccggtaaacagtgtgttaagtcaggggtgtcacagactgatcaggcagggagcggggatactgattaccccggaagaattgatggatgaatggaacattaatccggtggaaatcgggcaaaaaggaaacaaaagtgaaaaaatgcttgaaagtcctgagtttatggtgtatagttgtctcgatttgtttccgaaagggacaaatcagctgatgaaagaaacaggactttcggttacagagttaatggaaagactgatcacgttagaattaaatggatatgtaaaggaagtatccagaaattattatataaggctgcagtaaagatacagccgctattatggaggaaattatggcacgctatctggtaatcgtggagtcacctgcgaaggtgaaaacaattaaaaagtttttaggaagtaattatgtagtgaccgcatcgaatggtcacgtaagagatatgcccaagagccagatgggtatcgatattgaaaatgattatgaaccaaaatatataacgatcagaggaaagggagaaatccttgcaaagcttcgcaaggaagtgaagaaagctgacaagatttatctggcaactgacccggaccgtgaaggagaagcaatatcctggcatctgagtaaagcgttaaaattagaggataaaaaattttatcgaatcagttttaatgagattaccaagaatgcagtaaaagcgtcgcttaagaatccaagagagatagacatggatctggtagatgcacagcaggcacgtcgtgtcctggacagaattgtaggctacaagatcagtccgcttttgtgggcaaaggttaagaggggattaagtgccggccgtgtacagtctgttgcacttcgaattatcgcagacagagaagaggagatagatgcatttataccggaagagtattggacacttgatgcgaatctgaaagtgaaaggcgaaagaaaacttcttacggctaaattctatggaacagagaaaaataagatgacgatttcatcaaaggaagaactggatgcaattgtcaaagaagtagagaatgcagattattctgttgcagacataaaaaaaggagaaagaacaaagaaagcaccggtaccttttacaaccagtacacttcagcaggaagcgtctaaagcgctgaattttgcgacggctaagacaatgcgtattgcgcagcagttatatgaaggtgttgacatcaagggcagtggaacggtaggtctgatcacatatctgcgtactgattctacccgtatttcagaggaagcagatgcagcagtaagagaatatatcaaagaaggattcggagaagaatatgtagcggagggtgatgcaaagaagacttctgataagaaaatcatccaggatgcgcatgaggcgattcgtccgactgatgtaaccagaactccggcagcagtgaaagaattcctgagcagggatcagttccgtctgtatcagcttgtgtggaaacgctttatcgccagcagaatgcagccggcgagatatgagaccacttctgttaagattgcagcaggacagtaccgttttactgttgccgcatccaaagtttcatttgaaggtttcaaaagtgtgtacacagaagcgggagaggcaaaagaagagaacaatgtattattaaaaggtctcgatatggattcggttcttacgaaggaaagccttgatacgaagcagcactttacgcagccgccggctcattatacagaagcaacactggttaagacactggaagaactcggaatcggccgtccaagtacttatgcgccgacaatttccacaattattgcaagacgttatgtggccaaagaaaataaaaatctctatctgactgagattggagaagttgtaaatcatattatgaagcagtcattcccaagtattgtagatgtgaactttacagctaatatggaaagtcttcttgatggagtcgcagaaggcaaagtcagatggaaaacaattattgaaaacttctatccagatctggaagcagcagtagaaaaagctgaaaaagaactggaacaggtgaaaatagaagatgaagttacagatgtaatctgtgaacaatgtggacgtaatatggtagtgaagtatggtccgcatggaaaattcctggcttgtccaggattcccggattgccgtaataccaaaccatatctggaaaaaataggagtaccatgcccaatctgcggaaaagacgttgtaatccgtaaaacgaaaaaaggaagaagatattacggatgtgaagataatccggaatgtgaatttatgtcatggcagaagccatcaacaaaaaaatgcccgagatgtggcgcatatatgcttgaaaagggaaataaactggtctgcagtgatgaacagtgtggatatgtagaaaatattgaaaatactaaggaaaattaggaaaattcgttgaatgtttcagaattgtatgataatatacattcataaggatggaggaatgtaaatgggcgtacaattgttggataaaaccagaaaaatcaacaaattactgcataacaacagttcgagcaaagtcgtatttaacgatatctgtgaagtccttacagagattctggattcgaacgtattggtgatcagtaaaaaaggaaaagtgcttggcggaagcaaatgtgaaggtgtgccttacattaccgaattgatcgagagagagatcggaaagcatgtagatgatatgctgaatgagcgcctgcttagtatcttatcaacaaaagaaaatgtaaatcttcagacacttggattttccgaagaaactgtcaaaggttaccaagcgatcattacacctattgacattgccggagaacgacttggaacactttttatttataaaaaagataaggtgtatgaaattgacgacattattctgagcgaatatggaacgacggtcgttggccttgagatgttaagatccgtgaatgaagaaagtgcagaagagaccagaaaagagcatattgtacagtctgcgatcagcacattgtcttattcggaactggaggcgatcattcatatatttgatgaactggatggagccgaaggaatccttgttgcaagtaagattgcagatcgagtaggaattacaagatccgttattgtaaatgctcttagaaaattcgaaagtgcaggggtaatagaatcccgctcttcgggaatgaaaggaacgtatattaaagtaatcaatgattacgtatttactgaactggaccgcattaaagcagaacgtacaaaataataagaattataaagggtatcgggcgactgatacccttttcatactataaaaggaggatacaggcagtgggatatgaaggatgtacagcaaaactccgaatggaacgtgtgattctggaggacagtttttttgatgaaacggaatatttatgtaagatcatagcatatgatgaggaagaagaaacgttgtatctggtatctgaagaagcggaacttacatcatattcattggacggtatttatgaatgcagcattgagaatttagaagatccggtgatatgtaaaggaattataaaagaacgttactggaataaggttggaaaagtgatgaaattcaaaatacaaaacggattttataaaaaacttctaaactaaatagaaagtgtgttgacaaaccaaaaagagagtgctattttatatctagaatctttcagcactctcttttgttgagtgctaataatacagaaaatgatttaaggaggaatagatatgaagttagtaccattaggtgacagagttgtattaaaacagtgtgtagcagaggagactacaaagtcaggaatcgtgatccctggacagtccaaagaaaaaccacagcaggcagaggttatcgctgtaggaccaggcggaatggtaaatggaaaagaagttgagatgcacgttacagcaggtcagcaggtaatttattccaaatatgcaggaacaaatgttgagatcgatgacgaagaatacatcatcgtaaaacaagatgatattttagccatctgtgagtaattaagcaaatcatttatatatttcaggaggtagataccaatggcaaaagaaattaaatatggtgcagaagcaagaagagcgacattttttcgtcctcctgttttttatatggtaactactcatacctgacagctttgcttgcatactttggtataaaaaaagcctgttcatctcgctttataagagacgaaaaaggctcatattccgtggtaccactctttttcacccgacatcatctgtcagatgcactcattgatcttctgtaacgggaagttcccgcttctgcctatgttatcatgattccggataaataccttgtatcccgtatcttctctatccacatgatctgttcagcaaaagaactctgaggcgagttgggagtcttcgtctgctgccttgcaccaaccgacagttctcttgataacgctggactcttaatactcctcttctgcgcttttttcaatattcttcattattatatgaagaatgttaaaataagtcaaggcctgtctttaagaaagtgtataaatccactgtgccttctgctttcagcaacattttatccaaaaaaattgtcagaaaattcatttttttggttgttattgccagttccatagtgtataataaggataagtaattactactgatgcagatcagtaaatatgatacataaaggagagtgtttaccatggtttatttattagcaggtcctaaaggaacaggaaaaacacagcagatgatcgagcaggctaacgaggctgcaaaaaaatgtaatggaaacgtcgtattcatcaaaaaaactcaccgcgacacagcaagtgtaacttttgatatccgtactatctgtatggatgattttccggcaatcaccaatattgacgaatatattggatttttatatggtatgtacagttctaatcatgatatcgaatgtgtatttattgacggaatcttaaaacatgccgatatctcactggataatattccagcatttatcgaccgcctgaaacaggtttccaaagaatgtgaagttgaattctatgtcagcatcagtgcaagcaaagaagatcttgctgacgtaaatatggaaggatgcaaatatctgaactaatcctttctgaatagaaagatctgacagtccatttctacaatggactgtcgtttttgttgtctgaaatactgatagtattttaaaatacaggagaaaaagtatgagcggaatcaaagatgcaaaaaagaagagagcccgaaggagacgtaagcgacagatacaacgtatcttattaatcattgccatggtattgatcctgattggatttatattcctggtccgagctgccatccgcactgttgtaaataaattcaccgtccctgcagttacaacttcggcaaataaaacagccggtaccaaaagcactgccggaaaacataaaaccaaaaagaaatctgcttcaaaaaagaagacttcgaccaaaaacacttccccaaaggcagattcttcaaaaagagctgttcaattagaaaccgtaaccatcagtaaaaaaaataaaaaaaatccagacaaggtttctcttactatcagttccaccggagactgtacattgggaaccgatgaaaatttcagttattctaccagcctgaatgcttattacgaatcatacggtgccgactatttcttccagaacgtcagatccattttccaaaaagatgatctgtctatcgtcaatatggaaggaaccctgacagatgaaactgcccgggaggccaaaacctttgccttcaaagcacctgccaaatatgctgcaatcctttccggaagctccatcgaagcggccaatctcgctaataaccacagtcatgactatgggaagaagagctacaccgatacaatctccgcactggacgatgccggaattgcttcctttggttataaccgggtgaagatcttcaaagtaaaaggaatcaaagtcggtgttaccggaatctatgagcttgcggatcaccaaaaacgtgcatcgcaggtaaaaaagaatatcaaagcattgaaaaaagccggtgctcagattatcatcgtaaatttccattggggaattgaaaagcaatatacaccggacgagaaccagaaggctcttgcacatctcgccattgatgaaggtgcagaccttgtaatcggacaccacccacatgtgctcgagggcattgaaaaatacaacggaaaatacatctgctacagccttggcaatttctgctttggcggcaattctacacctggcgatacggatagcatgatcgtacagcagacattcacattccataaagggaaattaaagaaaagcagcaaattaaatatcattccctgctccatcacttcttccagcggttacaacgattactgcccggttccacttaccggagatgagaagcaacgggtactggataaaatttcacaatacagtgaagaactataactctgcaaaaaaactctgcaatatgtttcatacatattgcagagcttttatctgtcttactctattataatgcaatcagcatttcataactcagcaccatcacaggcatcgttataatacagaatatcaccgacattacattaatcacactcgcatatctggaatcctttccataaatctgtgcaagctgtgtgatcattgctgccgccggagctgacgttgcaatcagaacaatcatcagaatatattccgcatccggatgaattccactccgttccaatccggcgaaggcaacaaccgcaatcagcgggaatacgatcagcctgagcaggcagatcaggtacggacgcttttgacggaatacccatttcagatccacatctccgatcaccataccaattaccatcatactcgccggactgatcatatctccaaaaccactgacacaactgtcaacaaccgttggaagccggatctccagcgcaaaaagcgcaattcctatgatcatcgcgatcacattcggattacacaggattttcctgatattcagctccttttcctgtccgatcagtttcacaccatgcgtccacatcagtaccgtctgtaccaggataaatgcagtcgtataaaaaacccattcttctcccagaacagctcccaccagtggaatcacaagataccctgcatttgtataaatgatagatgctttttcaatactgttaaagtggaatatgaatgataaaatttccgatccgatgatcagaaccatatgcactaccactgacagtccgattgcgatcatcagccccttaatcttatcatctgtcaattcaatctgaaacgaatgaacaacgacacacggattacagatatacacaaccatatttgaaatgatccggctgtcctctgttttaaaaagaccagccctgaccactccgaatcccactgccatcgtaagaaacatagccaaaatctgctccgcaagaagtatactaatttccattatcctctctcatttcctgcatcatttctatatgatgaatcttgttactcctgtgtacctgtttccttctctatcttatcagaagaagttttatcttttgctttttcaccgatgtcaagtttggtaaccgtattgacatctttatcttctttgtaagtgactgtcacctgttctccaagttcacactttattacatcaataatatctgctactgacacatcataaatcgcatcagaatcttccaacatcagataataatgtgaatttccatccagaaccgcctgcgcaatctttgtaatttttccggatatttcttcttccttacgcgtgtccttttctttttccttcacaccatttttcagaagaagttcgttataattctcctgacactggctgacactgtccccgattgcaacgatctgatatttctgaacatttaccatggcatattttttaaccagaccggcatcgtcttttaatgcaacaaaatatgtcggctcacccgcaatgttcaaaagtaatggaaatgttgcctggtatttcaggttctgcacctgtccttctgcggatgacattgcagaagattctgttgcaccttctactttataatatttcgtctccattgtacgctgatttgccagaacaaatccaacatttgactgatctccgtttacagaagtaactccggtatacatccacacatcatcatttaatgccagatagttataaccatccgttgtctccagacagtctttctgactcagcacactgttaaagaatccgtgttttaattttccataataatcaaataaatttactaataagtctgcggaatatacacggtctacccactgtggaacatttccgacatcatatgtctttgtttttcccgtcacagcattacagattactacttttcctactgtttcaccaccaaataatccaatgttgaatttctttaccggtgcgatccaatatggatctccattttcatcaatctcaaagctcagctctccataaatatatgtcggatgtgcgaaacgtaaatgacgataaatattacggttgaaatgatcactcgttgtatatttcataccctgtttcaatttgacaagctccgtagactgattcgccatattaatccggatataagacggaattccttcactctggttggtaaaccatttgatcaggctcgcgtatttcagcggagtcacacggaccggattgcccttatagttgatctggctgtagatatcatccgcctcaaactgtgataccatgtccaccatgcttcccatcttacggtcaccgagaagtgctgccgtatccttatccagaagcgggatcttgtcaaatgacagttcatctacatcctttgtaaattcaccctctttaactgtcataagcttctgatactttttggcattaataaccggagaagaaaacagtgttcccaacagatatacaactcctagaaacactatcactccaagaaatccttttactactttactttctctgacttcatatctgttcaatttctttcttcccagatacagaacagccaggatcaccagaaagatcatgataaaaaaccatgtctccgatgaatgaatgttgatcgccggtattgccgcatagtaatagatacctgcaaggattacaacaaataccgtgattattgctttcgttttacctttcataattctctcctctcatacagtgatactttggtatagaaaatcaggcggcttcctaagtgccacctgttattctaaaattttctgcgccatgccggtgccgtaaacagcactaggaacgggaatatctccaaacgtcctgccagcatgtcaaaacataatactaattttgataatatagaaaaatcagcaaaattacccatcggtccaacctttgccatacccggtccgacattgccaagtgttgtaaggaccgcactgaatgtcgtctcaaaatcaaaattatccagtgataccaacatgaccgatacgatcaaaattccgacatatgctataaaataaatgtaaatcgtacgcagaatatcggaaccgactttcttaccgccgatccggatgattccgactgatttcgggtgtgcaagctgtacgatctctctttttatacatttgattcccaccagaagacgggataccttaataccacctccggttgaagaagcacacgctcccacgaccgtcagcatcataagtattgattttgagaacatcggccattttgcaaaatccgttgtcgcatatccggttgttgtgataaccgtcacgacctggaatattgcatagcggaacgccttgatcatactcgggaacatcgaatggatattcagtgtgatcaacgctgttgctccgacgatcagcataatatacgtacgcagttcctcattctttctgactgacttaaaatcacctaacaacataaaataaaataacgaaaaattcactccgaataatgcacagaatgttgtgatcactccatcaatataagcactgtggaaatgtgcaacactgtctgcataattcgagaatccacctgttcctgcggatccaaaagaaaagatcatactgtcaaacagattcactccacccagcatcagaaaaatgatctctacaaccgtcatgatcagatacataccatataagatacgcgctgtagacattgctttcggaacgagtttgtccttctccggccccggaacctctgcacgcatcaggtacattgagttctttttatctaatgatgtaagcaccagtacaaacaccagcactcccattcctccgatccagtgagtcagactccgccagaacaacagacactgcggaagcgcttctacatctcttaaaatactggaacctgtcgttgtgaatccggaaaccgtctcaaaaaacgcatccatgtagtttggtataaagcctgatatcgtaaaaggcattgcgccaaacaaagaccataaaatccatgcaagtgcaacgattaccataccttcttttccgtaaatatgactttgctccggcttttttacacctgccagaaaaaacagtaacaataatatccccgcaggtatcagaaatgcaataccactcatttcctgatataatgccgctacgattaccgggatcataagaagcactgcctcaactcccagcattctgcaaaggatatatcttatcatttttgtattcataacctttgtctatctccttattccagtatgtcgctgaatttatcaatatgatccattgttacgaccactacactgtcaccgacttccagatgatcctcaccatttggaataataatacgcctttttcttcctatgcaggcgatcagattattcttctttgtccgcagttcacgaagcggtacattcgtgaaactgcattcgcatttgataatgaattccaatgcttccacttttccacccaggagctgatacagagattctacgttcacattgctcgcagattcatttctcgctctgacataactcataattgcatctgccgttgcactttttgccgacacgatcgaatcaattccaagcccttctaccatctgcgctctggaatcctcattgacctttgcgacaatcttattgactccctgcagttttgcaaagagtgccataataatattctcttcgtccataccggtaagtgcgatcaatgcgtccgcttcatggattccttcttccataagaagatcatgattggctgcatctccgtgaataaccgttgccttcggcaaaagttcacataattcctcgcatcttttcatattctgctcaatgatcttcacctgcatgcctacctgcaaaagctgcattgcaagataaaaacatacatgtcctccaccacagatcagtacctttttcacttttgcatttctgtgtcccagtgcacggaaaaatgacttcagatcctgatgcgctgcaacgatatgcattttatcgcctttttccagaataaactctccatccgggatatagattttctgacctctttttactgcacataccaaaattttaatctggaatttccgatatacttctgcaagagaaagtcctgcaagtgcactgtcttctcttacaatgaattctaccagttccacacgtcccttcatgaacgtctctactttactcgtctccgggaaaagcaataccctggcaatctcatttgccgctgttctttccggattgactgccatactcagatgcagatcttctttcaacagatcgatctgtcgataatagatcggatttcgtacacgtgcaatcgtatgtctggcgcctaatctcttggccagcagacaacttaacatattcaattcatctgtcgatgcacatgcgatcaccagatctgcatgcggaacatctgcctgtctctgaacgtctacatctgctccatttccggtaatgcagaaaatatcaagcttattcacggcctcctttaattttccctcattttgatcaatcaaaaccacatcataattttcttcggacagctgggttgtcaatttatgaccaacctttccgtccccaataatcacaattttcattccctgacctcacaattatccactttgtatctttattattatccggatacctgtatttttaacacaagagattatagcatctttgtattaagaaaaaaagcccttacgggcttttcttctatttatacattttcttagcagtttattcttcttttgcacgtttactgatctctgcttcctgcacatctgacggtgcctgctcgtagcggctgaattcgtaagaatatactcctcttccacctgtcatagagcgaagcactgtacaataaccaaagagtcctgtcatcggaatatctgccacgatctcctgttttccaccagaaacaggattcattccaagtacacgtcctctgcgtttgttcagatctcccataacatcacctgtgtaatcatccggaactgttactgtaagagatgcgattggttccagaagtaccggggaagcttccatgaatcctttcttgaatgcctggatcgtagccgtcttgaatgccatttcggaagaatctaccggatgataagatccatcatataatacagcttttactccaactaccggatatcctgcaagaggtccttttacaactgcttcctgcagacctttttctactgccgggaagtaattcttcggaactgctccacctaccacttcttcttcaaatacataaggtgtctcaagatcaccagatgcttcaaatctcatctttacatgtccgtactgtccatgtcctcctgattgtttcttgtatttggaatcgacatcggatttcttcttgatcgtctcacggaaagccacctttggtgtctccagtttgatctcacatttataacgtgttgcaagtttacttgctgtaatctccagatgctggtctcccataccataaagcagtgtctgacggttctcactgtcattgactgttttcaatgtcacatcttctgccatcatcttctgcaatgcctgagatactttatcctcatcacctttattgttgcagatatatttcatatatgtatatggtttggaatattctgtctttccatacataacaggcgtattcttcgtagacagtgtatcaccggtctttgtattcgcaagcttggcaattgctccgatatctcctgcaaataattcgctgacttctgtcggcttattacctaccattgtatatatctttccaagttttgcctctgcatcagaatctccgttatataatgtatcatccccttttaatacaccggagcatactttgataaatgaatactttccgataaatgggtctaccatcgtcttaaatacatatgctgatttcgcttttgcgaaatcataattaccttcaaaaatctcattggtcttgcggttgattcctgcacagcttctattatcaggacttgggaaaaatcttacgatatcggaaagtaagtttgcaactccctgtgcctgaatattagatcccatagcaaccggtacgatatctccgtccataacttcggtacgcattgcagaacggatctcttctactgagaactcatctccatcaaagtatctttccataaatgcttcacttgtctctgcaactgcttccagtaacttatcacgataaatctccagatttggtttacaatattccggaatctcacattcttctctctgtccgacacctgtgtaacgtcttgccgcattcttgataacgttcacatatcctaccagtttctcattctcacggatcggctggaaatgaggtgcaatcacctttccataacgatctgtaaggtcctgtaccacctgacggaaacttgcgtcgtctacatccatctccgttacatataccattcttggaagtttgtacttgtcacaaagttcccatgctttctctgtaccgacttcaactcctgctttaccggatacaacaataacagctgcatcagcggcacttacagcttcttcgacttctccgacaaagtcgaaatatcccggtgtatccagaatattgatcttggctttctcccattcaatcggaattaagcttgtactgattgaaaattcacgtttctgctcttctttatcaaaatcactgatcgtgttaccatccgtaatctttcccatacggtttgtcgcccctgacacatatgccatggcctctgcaagactggtctttccgcttccaccgtgtcctaagagaaccacgttcctgatttcgtccgttctgtaaactttcatatagctgcctccttattttggtaaaatctcatgtagatattgtactaaactttctgtttttttacaacacttttatacactttaaccatattatttttgtatttattttcaaataaatgtgatttttcacttatttcagaattttctttgcaattttatactgcagattgtctattttctcgttttaccctattcgctttttcactttaaagcattatagtattgacaaatcctcttacaacacgttacaatatgaactgagtttctagatcaaagcacaaggaggaaacatcatgaaacacaaaattggttttatcgggctcggactgatcggtggttctattgcaaaggccatccgccagtattatcccgattatgagattgtggctttcgacaaaaacaaagaatcccttgcacttgcaacccaggaatctatgatcgatgttgccgcaactaccattgacaataattttcaaaattgtaactatatattcttatgcgcaccggtcgcatataatacagcctatctgaaacagctgacggaatatctgaatgatgactgcatcctcacagatgtcggaagtgtaaagacgaacatccacgaagaagtgcagaatctcggtattgggaagtatttcatcgggggacatccgatggccggatctgagaaaagcggttacagtaattccaaagctatgctgattgaaaatgcatactatattcttactccgactcctcaggtagctgaagaaaaagtacaaacttatgaaaaattcgtggaaagcctgaaggcccttccggttattctggactaccagcttcatgaccagattacaggaaccatcagccatctcccacatatcattgcttcttcactcgttaattttgtcaaaacacacgatacacatgatgagatgatgaaaaatcttgctgctggaggatttaaagatatcacacgtattgcctcttcttctccgatcatgtggcagaatatctgcctgaagaacaaggacaatattgtagatatattagataagtacatagactctctggaagatttcaaagaagctatcgaacgtgaagatgatctggatctttataaccggtttgaatcctccagaaattatcgtaattccatgccatcttcttcggccggaccgatcaagaaagcatttgccgtatactgtgacatcattgatgaagccggtgggattgctgctatcgcaaccattcttgcttccaataatatcagtatcaaaaacattggaatcgtacacaacagagaatttgaagaaggggttctgcgtattgaattctacgacgaagattccagcaaacgcgccgtaggattactgcagaaattcaggtatatcgtttatgagcgttagaacaattgcacccacaaggggattaaaaggagaagtaaccataccgggagacaaatccatctcccatcgttccattatgttaggttccattgcgcttggaaccacagagatcactcattttctggatggagccgactgtctttccacgattgactgtttccgtaaaatgggtgttgagattgaaaggaaaccctccagtatcctggtacacgggaaaggtctgcgcggcctgaccgccccggcttctactttaaatgtaggaaacagcggaactacaacccgcctgatctccggaattttgtccgggcaaaattttgcgactacattatccggcgatgattctttgaactccagaccaatgaagcgcattatgacaccacttaacaccatgggagcacatatcagaagtctcaacgacaacggatgcgccccgcttcacataagacctggtgctctgcatggtattcattaccagtcaccggttgcctctgcccaggtaaaatcggcagttctgttagccggactttatgcagacagtcctacttctgttacagaacctgctctttcccgtaatcatacggaacttatgcttcagggattcggcgcatacgttgccacagatcttcatacagacggaactgccactgcacatgtagaaccatgcaaagaactttacggacaacagatctgtgttcctggcgatatctcttctgctgcttactttattgcggccgcactgttagttcctggttccgagcttcttgttaaaaatgtaggaaccaacttcacacgtgccggtttcttaaaagtctgcaaagccatgggagccgatatcgaaaccgtcagccagacaatcgagggcggcgaaagccgtgctgatcttcttgtccgctacagccacttaaaaggaactgtaatcaagggtgatatcatcccgactctgatcgacgagattccgatgatcgcaattatggcagcctttgcagatggtcagacagtcatcagagatgcagctgagttaaaggtaaaagaaacgaaccgaatcgatactgtcactgcaggattaaaagcgatgggagctgatattacaccaaccgatgacggcatgatcattgaaggtaccggacatttaaatggtgcttctatccaaagctaccttgatcaccggatcgcaatggcattctcggttgcgggacttgcatctgacggtgaaacgcagatagtggatagtcagtgcgtggatgtgtcttatccggagttttatgcgacgttgaattcggtttctatttaattaattcatcatcgtgacctctcagtccatgagaaagacttggtgttatgtttgttgctgaatgtcacgatgtagatgttctaaggcagtccgccttccctaagaacaaaagggcctccgctcaaaactcggcattcgcctcaaacacttcgctccgtccctttaacgggaaggcaaactacctaagaacatctacacatcgcgccaaaatacgcatcaaacataacaccaagtctttctcatgtcgtgataggccaatgataatgaattcaatagagggctgtaacctttgtgtgtaactggaaagttatagtgaatgccttaattttccaacttttccgatagatacacttccggcatcacaacggttacaattcccggtatttaattattcaggaccgggggaagccgccatgatgattaaatagaaaccaacatccttctctcctccgcaatccgaagcagttcccccatcttttggttcatacttccaactttcactcccgcattgattacctttccacatttttccatgatctttaatgccttctggtaagtctcatcggatatcggttcatatggctcttcgctgatgatcccggatgccagaagccgtgccagctgatagtcgctctcacccggatagaggattccggcggcaaatgggatcccggctttctgaagttttctgtagaccgggattcctgttttaccggaagataataccagaacttccggttctccttccggctttggaagttccacacttccgaatatcggatcgtaataaccattgtcgatttcataaagatcacgaattgttgcttccgtgaatatttcttccggatcaccaaattcggcaatccggtcgcctttgacgcagataacctgatccgatattttttgcgccagatcaatctcatgcagagacataattacagtaattccgttctcttttgccatctttcttaagattgtcagcagttccagtttatgacggatatccagataagaggttggctcatccaggatcatcacttccggttcctgacagatagcccgggcaagcagcacccgctgcctctgtccatcactgatttcctgaaaattacggattccaagttcctgtgcatgtaccgcctctaatgcctcatccacctttctctcatcttcccttgacaagattccaagtcttccggtataaggataacgcccggtcgctacaatatcatgacaggtcatcaattctggtttcatcctctcggtcagcatcacggccgccttaactgccatctctttataagaaagtttacggatttcctcgctatctatgtatacttccccgccaatcagctttaactgtctggtgatgctttttaatattgtagattttcccgctccattggggccgatcagtgtcacgatctcgcctttttttattttcagattaatatcgcttatcagcgcattcccctgatatcccactgcgagatctttcatttttatataatactctgtcatcttctacctgcctttctgcccacgcaccatcatgaagattacaacaggcgctccgaatatcgaagtcaccgtactgatattcaattccatcggtgcaaatgccattctcgcgatcagatcacagatcatacagaataccgctccaccaacaaatgtccctggtatcactaccaaaggtttcgatgtacgaagtgcatgttttaccagatatggaaccgctattccgacaaatgagatcggacctgcaaatgcagttacgcttgccgaaagaatactggacaaaagaatcagtgccaccctgaaaaagcggatattcactcccatgctctgcgcataagcttctcccagctgataagcaccgattggcttagacaggaaaaatgtaagtacagtcgtcacaccgatcacgatcaccgctacctgtacattactccagttcattccggaaaagctcccctgtgaccatccatgaagattgacaatatcagaatcctctgcaaatgtaacgacaaaatctgtgattgccgaacaaatgtagccaatcatgattccacctaccagaagtgtggccatatgcttcattttcctggatagcagtaaaataaaaccggtggagatcaatgctccgataaatgccgcaacaatcagtgtataagaagacacaaatgcatagcgttccaaaaagaatatcattgccagtgccaccatcatcttcgctccggacgaaattccaaggacaaatggtcccgcgatcggattggaaaagaaagtctgaagtaagaatccagataatgacaacgctcccccaaggattgctgccatcagaacccgtggcagacgtatcttccatataatatttgcttccgttccgccctctccccgtcttgccagtattttcaggatctctggcaaggagatatgtacatttcctgtattgatattcaaaaccgtaacaatcaaaaatgctgccgtcaatacagaaaataccagaatatatctggaacgccgtttaaaaatttccttttgataaacagatccggccgtattctgccgatccgttttctgattataagtgtctgccacgttatatttctcctttgatgaaaaatcaggtgaacatttccttttgcccacctgattcttattatactgtattattttaccctgtacaagaatgtcatatccttctcatctccatctgtcagcatcagatgaatatccgtgatcagattaccgactatatccgttgcctgatacagtgatttgccggtgcaccatacattaccgttcttcacagctttaaaatccttaaacagttcattctttgccgtcagctctgcaatactgtttatcggactgtcaattgttgcattgtagatcagatagtctgcttcttccgcctttgaatagaattcttccattgataattctaccgaagcactcttgctttctgtattcttaagatctgaaaaaatgtattttcctccggcaatatcaatcatcttcggaatataatctttactgcttcttacgaccactgttccatctgcattaacaaagaaataagcaaccgtctttcccgtattcttaaaatctttcaggttttcgatcaccttcgtctgtttctcgaaaaatgtatctgccacatcctctttattcaacattgccgcataagccttgatccattctgttctgccaagcggatgactttcatagctggaccggtcgataaataccggaatatccagatcttcgatcatttcctgtacttttggcgtatgcaggatcatcgttgattcaattgcaagatcacaatcctcatctaccagcatctcataatccggctcactgtattttccggcgaacaatatccggccttcctccatagcttttttcgcattatcaatataccagtctgaagcctgtgcgcctgacatccggatactttccaggccatccatcgaatcgaacagtgccattgccgatgttgctgcaagataaatgtgatccagcggctgttttaataccacaatatctttatccagatctgccggtttcttctttccttccggaacgatcagatactgtctgtcatcatgcacatccagtaatttatatccacctttataatagtaaacatcaaaacctgtggcatattttaactgcatcgtcttctgatacttcagtccgtctatcttcggagctttcttttcttctgccccgttttcttctgtctgctgtgttccgtctcctttggacacacccgatctgcctgaactactgcatccagtcagtgctcctgttaccagaagcactgtacttgcaagtacacacaacaagcgatatgttctctttttcattcttttctccactttttttctgattacatgatattttgtctgcattccgatcattttatgcgattcgcattctggtcatcttatataatccttattctgcactctgatcttcacatccaaggattacctgatagactttttcccattctttctttgcatcttttcccttttcatcttttgaacggtcaacgatcacaggcatctcaagaagcgtcatcttctcggtcatcttctgataagctttcattttctttctggcagctttcttactacttccttttttcggcaggataccagaagaaaggagtgccagatcacatttattttttaccagtttcttataatttaatttgccggatttacctgtgtaaatgatttctttcttttccatcttttctttgatagtctcattcttacacttctttttctttacaccaactgccgtcactttatcattctgtcccagtttggctatcttagaaatgatctcattggttcctgcatagatatgatctgccggctgtctcaccacgataacttccttatcaagtcctgcaggaatctctgcattttccggaacgatcagatattttacaactttgttcagatacagtgctgcctgctcctgctctgcaggattcagtccgcttgtatccgaagactgtttccatttcttaccggctgcttttcttcccgtctttttgctcatatcaatttccagaagtgtgatcccctgatcataatgatagattttgaaatattttgcatgctcggcttttgtctctgactgatattccaggccgatgatctcaggtgctacttcatccagtttcttacttgcagctgccgtcttactgctgtcactgccatttacaccgatcacggtaatttcttttccattggctcttgttgatgcatttgcttttgctgcttccgcaatgtatacaaaaatcgtatacttaatctcatgtgctgcagacatggctgttgtcatacctacaatcgtattattcttattcagttccaccggaattacaaaggaagtggagcttcctgttttggaacttggataatatacatttccattggctttcacatactggtaatgcgtactgctgaatgtgatcgttgcatatgcctggccaccggtaactgttaccttactacagctgattcttacctttccggttccacctgaccatgagaagctgtccggtgtgtatacgccatcttttaagcctgtggcactgttaactctggctgttgatttgttcagatctgattcgtattttgattctttgtccggttttccattgtttgttgtattatttcctgtatttccgttattgcttcctgtacttcctgagttatttccattggaagtatttcccgggttgttattattgccgcccggtgtcagcgacccattgcttccgttattgccattcgaagcatttccatgattgctgtccgcaatcttagtcatgccttctgaatggaatgtcaatgttctggtatcccatttattactcttcgttgtatgaacggcaatcgtcattacctcatccagtttctctaccggaatctgaaatgtatactgctctgcaagaagcgaatccggaaggatccagttcttttcatcatccgatgcgttatttacatcgcccagatagattctgttataaccccgaccgcttaatgtaactgccgccgtcatctgtccattctttacagtcataacacaatccgtaacacggaacatctttccgccggcttcagcattcacctgataggttccgtctgctatgatacgttttgcagaggcagatgaaaatataagtgtacggtcataccatttatcttttttaatggaatgtgccgcaactgcaattcctttatccagactttctaccggaactttgtatatatattttcctgcctcatcagccacatatgaaatgtagtcttttgctgcagcttctgccgcatcggctgctgatcccatataaagataatcatatccggttccgcttaatgtgattacagcatacatcttacctttttcagatgtcaggatacaattcgtaactttgaacatcttatttccagtatccacatctacctgataatttccatctgtcagggttttattttctgtttccgatgctgttaccgttaccttgcatgtggctttaagctctgttccttccgcattattaatagacacagtcacctcagcagtccctgctttcactgcggtcacctcagcctgtgttccggattttgcaacggttacaatctttggatcagaagaagtccatgtcatatccggtgctgtctcagatgctgataatgccggtgtgaactgaggtgtcagtttctgaacttctccctctttcatgctgagttcagatccctctttgaaacttaattccgtaataacggtctgatccggtgtggatggtgtcgacgggactgtatcttccgggattgcaatattgatcgtatatgcaatattttttccactcatggaactggtatgtgccataaaagtcattgaactatttaaattaacaggaatctcaaatgcaactccggcctcgccttctctcggttttgcatgatatatgttctgggttccattcactttcacccatactttatcatacttagaactgctaaaatttatccaggctgttgcttttccattctttacgattactttttgacactcaatcttcaccttgcttgaaccacccgaagtcagttttgccgaaaaatgatccgcatcaacactatattctccgtctttcaaagcacctgccataccgctgatatcagtaatgttctcaaatatttcatcttcgccgattggttccgtctgtggggcggttccgtcttcctgcgtattctgtaccttttcgacagctacctgatttttcccggcttcttttgtgacttcctgacttgtatctgtcgtcacactgctttctgtctgtccggcagcagcttccggctctgtctgtccagcttcatcattatcctgtttattctcactcaatgtatcttctacagctgcattctgatcttccgcatacactcccgataccggtgcaactgccatagacacagccataaataaggccaaaaattgcttggaattgtgtttcatcttttactctctccctactacttttctgtcaccaaaaatacccttccacgaaatcatccgtaaaagggtataaaatggccttgtgaatttattataattttcctccatttttgtacaaccaattactcgtggtccggatttacttccatgtacgctacaggcaggtctcctgactcacagatccatacatcagaagcttgtcttcccgttatccagtgacttttttcttttctgatattccctgctcacagtgacgagttcgtacaggacttgcacctgtttcccttttcaccggctctgatcaatcttatccaaccggcacctgcagttttcattctattcttttcaccttgactacgataccacaagtatctgtaaaatgcaattattaacccagattctgcttctgtaccatatcttccgtacgatatttttcaaatgtagaaagtacctctttctcatcagaaccatctactacaaagatcagcctctgattcaatgtaactgtcatcattcccataactgattttccatcaatgataagtttatgtacagtatcttcaatcagagtatcagcctctactttctgacacattcttgaaaattctacaagctgttctggtgtttcaaattttacattcatttttaccataattaagtctctcctctcaggtgtatccattatttttgttacaaacacatctgttcataaaaaaatataaatcagtatactacgtttttttctacaatgtaatatattttttatttcttaacattgtcttttcacatgggatatattatacttatctggcatcatctggataaaagatagcaaattatttttatatatcaattttatatattattttggaggatattatgagtacatacgattattaccgcattttctaccatgtcgcacaacagcacagttttacaaaagcggcagaggtattacacaataaccagccgaatattacccggtgtatgaataatcttgagacagaacttggctgccatcttttcgtccgttcgaaccgtggggtctcactgactccggaaggacagaagctttttaaccacgttgcaattgcctttgaacaactggagctcggagaaaccgagttgaagcgtgaccagagccttaccagcggactcatctccatcggagtcagcgaaaatgcactacgtattatgctgctgccaaaattagaagcatttcacaatcattatccacatgtaaggcttaagatttccaaccattccactccgcaggcaatcgcttccctggaaagcgggctggtggatttcgcagttgtaacaacacctctttcggtccagaagcagttccagaagatttcccttggttctttccgggaaattctgatcgccggtccgaaatacaaagaactggcttctcacatctgctcgctggaagaacttgcggaatatccttttgtctcgctagagaataacaccagcaccagagatcttcatatccagtacttttcttcccacggctttccgttccgtccggatctggaagttacatctaccgatcagtgtctggccctgatccagcacaatctcggtatcggcttctatccggagaaacttgcagaagaaccgctgaagcgcggggaaattcttcagattcatctgaaagaatctcttcctgcaagacacatctgtcttgtacagaatgcttccaagccacaaagtattgcagcacagaaactaatcgagacattgatccgcatctgacagcggatcaatgtctcctattttttcttctattatgctctgcttctccgtgcttctatatccaggaacatcagcaggaagctgacaatcaaaagtccgcacgatacccatatcatatggattccgtaattggcagaaagattgccgccgattccggctcctatcgcaaacagaactatgattcccaaataatacattgcctggcgcagctgctctggtcttctttctctcagataaaaagacagtgctgccgttccgcttctcaaattaccgatacacatcgtactcgcatatgagaatccattcaccttccggaaactctgcacctgcatcgcacaggcaaaggataccagaacagtcgcgatcatatttccgcgttgtggaataaatcctacaatgaacaggattataatctctgctcccagaattccctgtctccagtgcagacgttttgcatatttatacttatgctggatctgttctgcgatcagaacacccaaagcaaatgcaaaaagcggaaataaatacttcagtcccgcctcccattttcccgtcatgaaattctggctcatcagcaccacgttacctgtctgtgcattcgagaatacttcattacgcgtattataggtatatgcatcctgaaatcctcccgataaagccagaaatgcactacagatgaatgcctccgacatctgtttcccggaaaataaacttttcattactcccatgttttcatctccttagaaaaaacggggaattgctttcacacgtttttacgttttcaaaccaatccccctcagcagactattatacgagagaatatcaaaaatgtgaaacgtatttttaatatatctttcatatcttttttatatattcaatttgatattaagcctcccagacttcttctgcaacttcttttacaaacgaaacctttttccactgcttttcattattattctggattattcttacatcccgcctgtgtattttttcaacgcttccatatacacctttccataccggctcagtgccacatctttccgcacgatcgttccgatccgcatatattcatccaccagaagcggcttcccgatgatattctcaccgttcagttctttactgatcacgccggagcttaccgtatacccgtccaggccgaccgccagattgaaaagcgttgcccggtctctgactttgatgttcttattccggtccagtgtgcttaatatctcttcggaaaaataaaaggaattataatccccctgctcaaatgacaaatacggatactcctccagatcttccagtgtcagtgcttccttatctgccaacggatgctttgaactgataaatacatgtggctttgctacgaataactcttcgaatttcagatcattctgacggatcagtttcatgatgatcgtctcattctgtgaagaagtatacagaatacctatctcacttttcagcttcgccacatcttcgatgatctcataagtctgtgtctcccgcagtgtgaaatcatattttctcgcatcaaatttacggatcacatctacaaatgcattgaccgcaaaagaataatgctggcaggatacggaaaatctcgggttccgttcatttacattcagatacctctcctgcatgaggccgacctgatccagtatctgtcttgcataggcaagaaattcatctccctctgcggtgatcgtcacccctttattcgtccggtgaaaaatcgtcacctgcatctcctgctccagttcccggatcgcattggtaagactcggctgggaaatgaacagctcttttgccgcctcacttatcgtccccttctccgcaaccatggtaatataccttaactgctgtaatgtcataaattcttcctccctacagcatatagatcagtgcgttacagatacatgccgcaatattacttccgccttttctccccctcgctacaatatacggggtatcttccagagtcaggatcagctctttggactgtaccacatttacaaagccgaccggtacaccgatcacgagctccggacggattcttccgtctttgatcagttcatacaggtgaattagtgctgtcggtgcatttccgatggcaaagatcagtttttcgttcagttcacacgcctttttcatactggcaacagctcttgtggttccattcttctttgccgcctgtgccacatcttcatctgacatgaagcagtatacctgaccgccgtactgtgccagtctctttttgttaattccggaacgccccatctgtgtatcggttacgatggaagcaccgcctctgatcgcttcgagtgctttctccaccgcatgctcggaatacaccagattcttcgcataatcaaaatccgcactggtatgtatgcagcgctttgtaattggtgcctgaatctcaggaagcacgatgccttcctgctccagttcttccgtaatgatctcaaagctgcgcttttcgatctctgtcggaagaacattttctatctctattttagtatgtgccgcgtgattatttttctgtatattcaacgttttcttcctttctcttcatagtccgtcatagcccacatctcatcttttctaactacaaaacttgccatcggcaacttctcttgcatactttggtatctacagctccttacgaatacatagtaatcccgaaaaattatttctgcattcccatgatctgatagattgccttcatgtccagatgttttctgagtgtatctgccagaagatcatactggctttctttgaatgctttcaggtctacaccttccacttcttccattgaaagtcctttcttttctgccagggattttacgatctccgatacaattttctccttatcaaaaatgccgtggatgtatgttccgtatacatttccatgcgagattccgtctgtactgttctctattctgttttccggctccatatccggaatctgtctgtcctttttcttcaccgtatcgtgaatctgattcatcggacatccttccagaagttcggtctttcccatatggatctcgtatccttcaaacttcagattctcaagtgctttcagattcccctccacatgaaggagtgttccattcacccttgttctggtcttttctgtggtaaatgtagtcgttaccggcaaaaggccgagtcctttcatactgccgccatcttccacgccttccggatcactgagcgactgccccagcatctggtagccgccgcagattccccagaccacacagccgccggcatgcgcctttagaatcttcgcttccattccgctctgtcttaaccatttcagatctcccatcgtattttttgttcccggaaggataatcatatcaggatttctaagttctcttggattctttacataacgcagattcactcccggagcattttccaacagcatgaaatccgtaaagttcgaaattctcggtgtccggatgactgcgatatccaccagaccgatcctttcttctgcaccttttccaccctttgtcatgttaaaacgctctgtcagactgtcttcatcttcaatctcgacctgcatatacggtgtaactccgactaccggaatgccgcctctttcttccaacataacaataccgggatccaggattgtcttatccccgcggaatttgttgatgaccagtccctttacacgttctttctcatcatcttccaggagcataagcgtccccagaagctgggcaaatactcctccgcggtcaatatctccgaccagaagcaccggcgcatctaccatcttcgccagccccatatttacaatatcatctttcttcaggttgatctctgccggacttcccgctccttcgatcacaatgatgtcattctcttcttctaatttgtgaaatgctttcataatgtccggtatgagctgctttttataagcaaaatattctcttgcactcatattcttcaagacttcaccatttacgatcacctgtgatcctacatcgttggtcggctttaacaggatcggattcatctctacctgcggcgccacgcctgctgcctctgcctgcacaacctgtgcacgtcccatctccagtccatcctctgtaataaaggaattcagtgccatattctgggatttgaacggagccacccggtatccgtcctgtttgaatattctgcaaagtcccgcacacagaagactctttcctgcgttggacattgtcccctgtatcataatttttccagccatgttatcaacctttcattctcttcttcagatcttattgcaatccggtaatgcccttctgtcagtccttcatagttactgcagtcccggatcaacagtccgcttttcagtgccttctcatacagtcctgcttttcctttaaaaaatatatagtttgcttccgatccccatacattcagaccaagctttctcatccgctctgtcatccagaacttttctttttttatatattctctcgttctctttaaatatgcttcgcaatcaacaagtgctgccacacctgcttcctgtgccgttaccgacacattccacggctggagcattgccctcattcgtttcctaagagctgcattctcacacaatgcatatccaagtcttacacccggcatacagaatattttcgtaaatgctttgataatgaccacattcggatactgtgtcagatactcccggcattcatatctttctggttcttccagaaactctataaaacactcatccaggaccagtatcgtaccgcatttattacacctgttcatcacacggatcagcagttctttttccgttgtctgtccggtcggattattgggattgcacagaaatatcatatctgtatcttccgtaatctgttccagtatatcctcctgtatccggaaatcctgttcttcttttaatctgtaatattgtacctctgctccaactgtgccaagtgcccgctcatactcggaaaaagctggtgccgtcaccagtgcttttttcggtctcactgccattacgacagcaaaaaaaagctctgcagcaccattgccgcagagtatcttttctttttctattctctcaaaatcactgatcgactcccgaagtctgtcgcatctgacatccggataatacatgatcctgtctgcactttcctgtacgctctttcgtaccgcttcgggaactcccagcgggttactgtttacagaataatctgtaacagatggattccggtaaatgtctccaccgtgaactgtctcttttggttctgccaacgttccttcacctgtgcggataaaccgctctctctgctattttgctacaaccatcttactcactttgcagaaaatagtcaaccggaatcttatacctgaattcttgttgccgcatcgctgctcattgcgatccgcttctcaccactcctgatgatcaggtctcttccggaattctgaatgactgtgatctcactgccttcatcaatcttgcattttcggatcttatccagaacttccgggatgccgaacatccacttgatggtgtagctttttccagccgccgcctttgacaatgcctgcataactaacaccttctttacctcttttttatattgtaagttgcactgactatgttagtcaacaggaacattgtttgcacaattctaactttttattcataatttgcagataatattatttgttttttgatttttattatcaatatcatctacagaaccagaatccggaggatgattccaagtatcaaaccaagcattgccgtcccatataacagcttatgcgatctccggatatccagtagttccatctcccggaccggatctccgatcgtcggcttcttatgcagctttccaaaataccacgcatctcctgcaagctgcacatccagcgcccccgccatgactgcttctgtctgtgccgagttcggacttttatgattaaagcggtctcttcggaagatacgtgctgcattctttccatccattccggtcagatatgcagccaggatcatcaacactgccgatacccttgccggaatgaaattcaccacatcgtctaacttcgctgctgccgttccaaaccactgatacttgtcattcttatatccaaccatcgaatccatcgtattgatcgctttgtatgtaaatcccagaacagctccgccgatcagcatataaaataacggtgcgatcacaccatctgatgtattctctgccaccgtctctacggccgccttggtcacaccttcttccgtcagattctgtgtatctcttccgacgatcatggacacggcctttctcccggcctccaggcccttgtttttcagtgctatgtagaccctgtcactttctactttcagggatttcgttgcaaggatctgataacaccagaagctttccaatgcaagtccaagctgccagaaatacttatatgcaaccgataagatcaccgccggaactcctgtactgaccgtcacaaccaccagcaccagaatccctccaccgatgcgttcccctgtcttattcgccggcagacagtttctgataattctttcggttcccgatatcagatgcccgatcagcctcaccggatgatacagccatcttggatccccgaagatcagatccagaacaaagcccgccacgatcgcgatcgtcatatatgtcattctctgaaattctaagttcatatccttctccattctttatctgataatcataataacttcctgctggtgtcccgtcttcctttactgcataccgttccatgatactcatgattgttccgccatgtgccacaaccgcaatcgtctcccggtcatgtgcctgcgcatcccgtacgacttcccggaacccttctagtgtccgccggatgaacgcttccctgctttccccttccggaaatggcagctttccaccactgtctatccatgcctgatactccgggcagccggaaagttcgatataattatgattttcaaacaggccaaaatcacactcccgtaacttttcattacagctatatgctcctgctttcatcatctccggataaatgatctctgccgtctgcacgcaccgcttcatcggacttacatagacatatgtaacctcaggatacattccttttctctcttccaaaagctgtattccttccagacataaagattcatccgtcgttccgatatagcgtttttctttatttcctttcgtcatcgaatgacgtatcagataaatcctcatacttcctttatcacctgtccgattccgcacatcacacggtatactttctccgaatatgccgcaaggcgcgtgcacactcttccggtctgctctctgtattcccgttccatccggtcaaccggcacgatcccgtatccaatctcatctgtgatcaggatcagttccggattcttccgaatcagttcttctgcaagatcatctatcggttctccttcctttatctttctttcgatatactgatggaaatgatatatcccttcgcagctatatagttcttcttccgtacataccgcaccgtctgcccatgtgacatctgggtagattttctttgcgaatgcaagttttccctgatatgcgccgcctattatcatgatcatgacttcttttccttcctccaatcctgtattttcatctttctgttattttctactatttctctgctgttttctttctgccacttgttttcttcattctttccacacttttatccagcctgttcatcatttgatgattccgctttttactacgatatccactactaccacgacaagcgccatcacaagttcacatacctgcaggaaatatccacacagatccccggtcacaccgccgaaattcttcatcgccatccggtaataatatccaaataccacgcctgccgagatcacacatccgattccgcagatccctccggtcagtggaatcaggaaacacagtacaatcagataaatgcccaataccattcttgtaattctggtcgatgcactttccgaaaaatctgccaccatacctttcttccttgcctgtggaaatgtaactacagacagtccactcaatgttctcgatagcatgaagctatatgcgatcacttccatactccgtacactcagacaagaatacacgccaatatacatcagaaaatagatggtacatgaaatgatagcaaatgctcctgcgtgggaatctttcagtatttccagacgccgctctttcgtctgccaggaactcagcgcatcctgtgtatccagaaatccgtccagatgaattcctcccgtaataaataccgggatcagaatcagaaatattacaaaaaataaggaataatttcctcctccattcccatcaaaccattttgaaaaccgaaacactccataagacaaaagtccgatcaccgcaccgatccatggaaaaaaacacattgcatacgatttattttcatctgtccattcgctgcgcggcatcggaatcctgctgtacatggaaaacgcaattttgaaactattccatattctttttatactcttcatacttcttttgctccttacgaatgcataccggaattccatacacaacttccgttactatatctgcaagctctgcaagactttgattcaccattccgatgcattcccgatatttttccgtctcttcgctatagccgtttatatctgcgttcacttcatttgtaacaattacaagacgtgtcgtagaattgctcagtctgcgtactcctgccaatactttttcttttgtttcttttaaatcattcaatgtaccatcttctctgtaaagctcattggccaccagattcgatatgcactccagaaggattccctgattctttggtatctcaagttctgatagatctgtatatttttccaatgtccggaatccttttccggctctcagcctgtgatgtctttcaatctttttcatcgtttcttctgtgtatggctgcatggttgcaatatatatgtaagtaccatccttcttatttctgcctgtcagccagttctccgcatactcagatttaccgcttccgcttccgcctgtcaccagatgtatcattctttctcacctaattctttataatcttcgatgtcattttctgaaaatgtactcatccgtccatacacttctgccgcaagatccagcaccggaagatatgccacagctccggttccctcacccagacacatatctgcatgcaatggtgcatccatgtgtaactctttcaggatcttctgcattccaggttctttcgagacatgtgacacaatcatcgcatctttgacccactcacagattctgacggccacaagtgccgcaaccgctgagataaatccatcaactacaatcgggattcgatatacagcacctcccagatagagtccggtgattcccgccagatcgaatccgcctacttttgccagtacatccaccggatcatcccatttcggacgattgaccgctatcgccttctcgatcgcgtgtatttttctttccaatccttcgttcgtcagtcctgctccccgtcccgttatctctgccggttcgtctcccagaagtacggaagccacggcactgctggtcgtcgtatttccgattcccatctctccggtagcaatgatcttatatccggcttccttcttttccttcacctgatgaatcccggttaagattgcctgtaacgcctgcattcttgtcatagccagacctttggtcatatttgcggttccatttgccgttttatatcttgggacttttgtatccgctgccataccgatatcaatgggaaagatgtctacaccggcttttttacacatgatcgccgcactggtattacatgtcagaaaattctctgcaacaattgcagttacttcctgtcctgtctgcgttacaccttcttctaccactccgttatccgcacacatcacgatcagcgccttccggttcagattcacgtctgtatcgccggtcagtgccgcaatctgcataatatgatcttctagttttcccagactgtgtaacggtttcgcaatggagttccactttttctgcgcatttcctttcgttactacatctgccggatgaatgccagatacgatctgatggaattcctgttccagttgttctaaactttgctctgccatgctttttatcctctctgttctctatgttctatctctttccccggctcttttctcttgttccctgcatcttctgcattgttccagaaagttctccgtaatcttttcatttccataataatgaatatgcggatatcctgccagtactgtatcggtactgatcatgcatttccacgaacggtttgacattggtttttccgccagaaatgcttccccgcatacttctgaatcataataatgaaattcatgtgccgggatacctcctgcttctttaccgaatattcttccccctgtcagggtaacatagccgaatcgctttaaggaacctgtcggataacttttcccttctaaaaatccaaccattggaaattctgtgccgctttcatctctgatatattcctgcaggtacatgaatcctccacactccgcgatacatggcattccgccgttcaatgcttttttaatactcgtcttcattgactcatttttacttagttcttctgcatatagttccggataaccgccatagaacaaaagtcccgacagcttttccggaatctgcttatcgtaaagaggagaaaaaggaatcagttccgctcccatctcctgcaacagttccagattatcctgatagaaaaaacagaatgcatcgtcacttgcaagcccgatccgtaccgtatcttttgttctaaccgattctgtactatactgtgcattttctgccaaattttctaccatttctgatgtatatccttgcgttttcttttcctgcagctccggtgcattttctgccagttccagaaggcctgcgatatctacacttttcagaatctgttctcccagtcttgtgagtttgtcttccgtatcttttcgttcttttggaagcttcagtcccagataacggctctccagtgcacaatctttcataaccggaacatagccgtagactttgattcctgtctgcacctcgatcatctctttcattcttccatacatcatcggagacaaacggttcagaattacgcctttgatacggctgtcttctttataatgcaaaaacccctggatacacggcactgcagacacgcttagtcctttacagtccaggatcatcacagccggggtatcggtaattctggcaatgtcataagcactcgcctctgaagagatccctgcgatcccatcatagtatcccataacaccttccattacggaaatatctgctccggcaccattttttttcaggatctctctgactccattttctccacacaaaaaggaatccagattatagctgctgatgccgatcacagtcttgtggaacattggatcaatgtaatccggcccgcacttaaaagacgcaggatttatctcctgcatcttcattgctttcaatattccgcaggtcagcatggttttacctgcgccacttctcatcgcagtaatcagaattctaggaagtttcattactcagattcctccatttcttcccggattttctccggtgtcagatcccctacagagatcactttcgtaatatcctccacaatatctccggccatatctccggtcatatcttccggttccacctcgtccagattgatttcttccagaacgaaatcgtcttcattttccggatcagcttcattttttgccggtctgctcgtaaagctgatcacatagatcggattctgtccattcatcatatgataactgcccacttttttcgcacggcttaccgctacctgaatgacttctgcctcttctatctcattctcttccgtatattttaacacctgcatcatcgtctcgagtgagattgcattgagcaccacccgtacaaatgggttcttcttccggatagcatccaggatttcatacaactttcctttactgcccccgataaatacgcaatcaggtgccggcagttcttccagtgcctccggcgccataccttctatcacatgcagattatccacgtgcatccgccttgcattttcacggatcagttcctgcgcctccactttctgttcaattgcatagacgttaccttgcgttgcaaccatggcggcctctacggaaatagagcctgttcctgctccgacatcatatacaactgcatccttcttaatcttaagtttagcaatcgaaatgcttcttacttcttccttggtcatcggtacatcgccacgtacaaatgtatcatccggaattgccggaatcaccgggctttcgccgccggattcattttcaatataaaggaccgccagattctctcctttgtaatgaagcagtgatcttgctgttcctgtctgaatctcttcattcttataagaaagttctgttccgatcctgactgttacttcgcccattccatattccgtcatttttgtcaggatctgacggatctcttctgcattacttacaagggcgaatacctttttattctccttaatgaccgccatcagattttcttttcttccatgcaggcttactagtgccgcatcctcccatgttacgccaagctttgatgcaaaatatatgatggatgatactccaggcaccacttttgtctcaatctgtgggtcatctttcgtcaattccagaatcttcttcgcaccgctgtaaaatcctgtatcaccggacaacgcaatcgttacattttcatattccggattttctttgatataagaaatgatctcatccgggcggtatgcttcatatatggtctgtccgacttctgccactgcctcgatcatcctgcctgctccgatcagaagttctgcttcctgacagcatctttttgcttccagtgtaacctggtctctggcacctgcaccgattcccaccagtgtaactttccagtgattatccagttccagttctttctgaaggaatttggacatttcttcaaaattcattccctcttcttcttccggtcttccgatcacaaccattttcacaccggtttctagtgcagcctgacatttctgcgggtatccacctgcaagtcctgattctttcgttaccatataagcaatatcatattcctttaacatggcacgattcatttccgtagaaaacggtccctgcatacagatgagatgacgtccggagaatccaagttcttcacaattaactgccacctggccaatagacagaacgcgcgcatatacccggctttcgtaatccgtcagtcttgtataggattccagctccttgcttcctgttgttaccagaatatttccttctgttttttccagatactttatcgcttcatccatattttccacacagatgctttctttggtctcttcacttcccctgaccagtcttaaatacggaacctgcataacctcgcaggcacttttcaagtttttggtcacttctttggcatatggatgtgttgcatcgatcacataatccggctcaaacaccctcataaactcgcccatctgcccactgtccatccggtcgtgtgtcaccgttatattcttctcttccggaagcagactctccccataagcggttgccacacagacgtgcagtcttacgcctcttcttccgagataagatgctaattttcttccttctgttgtccctgcatataatagaatctttttgtctttcatatacgatatccccttggtgtaaccattttttcccgaattacttttgtctgtttatttccgataaatacagtagagaacatatctactgttgtctcttttaattctttcagtgtcagtgtctgcattgtttctccctcgcgggcaatgtttttcactattccgcagacggtatcttccgccttatattccagcatgatctcacatgcttttgcaagataggtactgcgtttcctactggacggattataaaggcagatcacaaaatcagcttttgccgcacagagaagcctttcttcgatcaattcccacggtgtcagaagatcacttaaactgatcagactgacatcatgtccgactgctgctccaagtaccgcagaacctcccagtgccgctgtcactcccgggattacttcgatcgctacttccggatattcctcaccgatttcatacatcagtcctgccattccgtatatcccggcatctccgctgcataccattgccgttacagctccttttgctgcctcttcgaatgccatcctgcaccgtgctgcctcctgtctcatggacgttgtcagatatctcttatccggaaaatattcttttaataattcgatatatacggtatatccgacgatcacatcacatttttccagcgtccggactgctttcaccgtcatctgttcatatgcccccggtcccattcctatcacatataccttattcaaacttcaccctccaattatcccaggcaaatgctgctgtcacaccattttctgcctgttttctgatccgcagtgtaccacctgtatatacagcacttctttcacatacattatccactccggtaaccttttttacaaatgtagaaacactgaattctccttctactttttttaattcttctgccggataaaattccggctctatgttatatttgttgcaaaatgtaagcaatccctcttcgtctttttttagatcaatgcttgcgatcctgccaatacttttcttattaatatgtgattctttcagtatcttatccaccagctgttctatctgctctgcggatgtcccccgtctgcagccgattcccaccgtgatccgttgtggtatcagccttaatacatgactgcttaattttcgttcatatatcccgatatagatatctggattctcataggtttccggtacgatcttcacttcttccggcacagtaccctctatcgaatctcttccgctctcaatcgcggccacgactgtctttccttccagaatctttgccgaaatttgctttgccttctgcatatcttctatataaagatgattctttctggcaaatacatctattgcccattttccccggatatctgtagctgttgtgatcacaggcagtgctcctgccatctctgcaattctttcagccatctcatttgctccgccaatgtgcccggacaggatcgggatacaatattgtcctttctcatccagtaccagtaccgccggatctgttgtctttgatcctataaaagatgcgatcaagcgcacggcaatctgtactgctccaataaagatcagtacatcccgcgtccggaactgttcacctgtccattctctggcactgcattttaccgcatccttgtccgattccagttctttgcattttaccgcctgcagcacctggtgtccttctttttccagttcatgtgctaaagatctctccagtcttcttccatttccggtaaaactgatcattgcaatcttcatcttattttactccctgacggaactcggtggtgaattccggatcatacagtttcgaacgttcatacgcatgatgtgtcaccacatctccaacgatgatcaatgctgtctttgtaattccatgtgctttcgcagtctctgccagtgtactgacagtacagatgtaactttcttcctccggccatgttgccttgtatacaattgctgccggcgtgtcttctttataaccgccttctatcaactggccttccagcttttccagaagtcctgtacttaagaaaagtaccatcgtcgcattatgacttgcaaacgctgcaaccttttccttcgccggaaccggtgttcttccttccatacgtgtgatgacaacactctgtgacacctccggaagtgtatattccagattcagtgccgctgctgccccgcagaaggaactgacacccgggcaggaatcatacgcaattcccagttcatccagatgatccatctgttcccggattgcaccgtacagacacggatcacctgtatgcagccgaaccgtcatcttctgttcccgttctgcctgttccatcacttccagaacttcttccagtgtcatcttcgcactgttatatatctcgcatgtctcctttgtactctttaacagccccggattcaccagtgatcccgcatagatcaccacatcagcctgctccagataacgctgtccacggaccgtgatcagatcttcggctcccggacctgctcccacaaaatgtatcattttccgactccttcctgtcctgcaaagaacctgccaccagcaacttctcctgcatactctggtatctattgtatatgtcgttcttttctgaatctttctatcagttcttctgctttttctgtctttccaaggattccgtatacattggaaaacgtgaccgctcccacctgtatctctcctttcccccggtagttcagatatttctccatacgcatcatgattttttccataatgcgtgttcgttcttcctcgctgcatttctccaatgcatcatccgtcgtcacacagtcaagaaattcgactgccttctctccggcaattcccgctctcaatgcggccgtggcgaataaatccatccgacagtctgcccatctggaatgggtattcatgattccgccggataccttgatcagtttcccgatatgtccgaccagcaggacacctttacaatcctgttctaccgccatatctatggtctgaccaatatagttactacattttaccacatcattttcttctatactatactgttctttcagaaaatccaatccgtaattacccggtgcaatgatcagatacctgtacttttccgcaaggcataccttcatctctacttcaatggtatcgatcagcgcctgttcactcatcggattcacaataccggttgtcccaagtattgaaagtcctccttctattccaagtcttggattaaatgtttcttttgccagtcttgccccttccggaatcgaaatctctacatcaattccaccggtatagccaacctcttcacaggcttcttctacttcttttcttatcatctgccttggcacacggttaattgcggcttctcccaccggctgattcagtccgggcctggtcactcttcctaccccaatcccgccatcaatatgaatctgtcctgtttcagaaagccttacctgactgtaaaccagtactccattcgtgatatccggatcatctccgctgttttttttgaccgcacaggataccatatccggcaattccctgtctgtatattttctctgtatatccgtgatatccagctgcagcttttctccctgcggcagttctaccgacacctgctctactttttcacctgtaaaaagcatctgcattgctgccctcgttgcagcctgtgcacaggttccggttgtatacccttttgctaattcttttttcggcatatggactcctttccatcaggaagcgaggttttggcttttttaatatcccctgacgcaaaaatggaggactgcagttttctacattcctccaccaattttagcgttttcatacttacatgtcaaattatctgtatgacggttctccacttattcgttaccatttttgttcttacattcttgttcccatgctttgatttcaccgcatgcgatcttcattcccgaatctccggacggctgggtcttgaagtcatccggcatctcatgaagtacgattgtccggccgggtatcaaccgcttaatgcattaaatagcaactctactgaataaacatcgcatccccaaatgaaaagaaccggtacctctccttcacagcctcttcataagccgcaagcacgtgctcccgtcctgcaagcgcagataccagcatgattaatgtagattctggaagatggaagttcgtgatcagacaatccagtactttgaatttatagcccggatagatgaatatctgtgtccatccactcttcgcttccagatgtccattctcatctgctgccgattctaccgttctgcagcttgtcgttccgacgcagataacacggtgtcccgtctcttttgcacgattgatcttctcagccgcttcttcatcgatcatgaagaattccgaatgcatatgatgctcggtaatctcatccacttttaccggacggaatgttccaagccccacatgaagtgtaactctcgcaatatccacaccttttgccttaatctcttccagaagttccggtgtaaaatgcagtcctgccgtcggtgctgctgccgaacctgtgtgagttgcatataccgtctggtaacggttcttatcctccagctggtgtgtgatatatggaggcagcggcatctggccaagctggtctaagatttcttcaaaaattccgtcgaaatcgaatttgatcagacggtttccttcttctaccacatcaatgacttctcccatcagaaggccatcaccgaaactgatctttgctccgacttttgctttcttacctggttttaccagcgtctcccatacgttgttttcttttctcttcaataataatacttcgattttggcattggtctctactttggaaccaatcaatcttgccggaataacctttgtatcattgattaccagacagtctccctcatgcagatactctgtgatttctttaaatacatgatgggaaaaagccccggtctccttgtcaaggacaagaagtctggagctcgaacgatcctcaagcggatcctgtgcaatcagttcttccggcaattcataataaaaatcctgacgtttcataattatgaattcctttcccttttattctttacgtatctttttctgatatgttttcatttacagttgcatttgaagctatttctttttctgatttattttctaccagacgatagccattatacactggttttcccagtttctcaactacagaactctgtgtattttctgtttttttcaattcccgtatcccagactctttcatttggacatttttctgcgtttttgacagctcaccctctgatgtctgcggtttctgctcttctacatttagcttttcacattctggtacaactgttcccggttgcgccatccatgcttttatcttcttctgatagaccactctggtatcacaaagcaagtcatgaaatccacgtttttccgaatcaattcctgcaacaatataaccgatattcaccggaaggctacataagaatcttccaaccgtctcgcggtacaccacattgaacagtgtcagcttctcttccggattttttgaaactacccggagattcatcgctttctttccaagtgtcgttcctgtcagataggtaaatgcaataaaatataacactttcagagcatacagtacgatatctttcaacgaataatgaaacaggatatccgttcccgttatcgcaccgccgccagccagtgagatacctgcaaatatcagccgcacgatcaggaggcctgcaaatactaccacactgtcgatcatataagccgccatccgcacccagaacccggcatactccagattcccactggcacagcaactgttctgtctggctaacttctcctgattatcgtaactgttctgcatagtacatcggcaccccgctttctacacttttggcggtttccgtcagaacctgcgcttctgacttcggaactaatgattctgctttggaaaacagcgactgcaaaagtccttcatctgattccatctcataaaatgtagatgttccaagttttttgctcatcgcatctttcatatccggatacagactgatctcatcgatcagaccgttgttcttcgcctgctttgcagtataagttcttccgtctgccagtttctttacatcctccactgacatatcacggccgtctgccacgatattcacgaattcctcataagcttcattgatctgatcctgataaatagcaatctgctcgtccgtaaatttgctgctgtccttattctttccgctcgtgatacttacataacggattccaagctttttatacagcccggacatatcatatcctgacatgatcacaccgatggaaccggtcgttgtattcgaatttgcatagattttatccgatgccatagacaccatatatccaccggatgccgcataatgtgccatataatcccagatcggacgttttgttgtctctttatattctttcagtttctgatacagttcttcggattcatagacagttcctcccggagaatctacatacagaagaattcctttattgttagaatcatccatcaattcatcgatataattcatcgttgaatcatgctgatatccgctggatgcctctagtatactgcttccactctgttcctggatcgtaccttctactcttacgattgcaatataatcttcagacggtggattaaactgatacgaacctccgagattaattatatcatctgcactgctctgaagcagattttttgaaattgtattggtaaatacgctggcagcactgactccaacgaacagtgctgccgctactaccagacctatgatctgttttttcttcatacgtaatcctcttgctctttttaccgagcttttatctgatatgaatgaatgttttttatttacgaagttcgattcccataccctcgagtgcctttaagatacggtccatagctgcagatacatctgcatcttccagagtcttatccttcgcacggaatacgatagaatatgcaacagatttgaatcctgttttaatctgagcaccttcgtaaatatcgaacagtgaatagctttccagatattcaccgcccttgctttcgatcacatcttcaatctgtcctaccagaatctcttttggcattaccatactgatgtcacgtgtcactgcagggaattttgcaattcctgtatatttacgatcaaatgttgctcttgctacgatctctggcatatcgattactgcaatgtaggctcttgttccgattccatagttatctgcaacttccggatgtacttctccaagatatccgactactacaccatcataaatgatgtttgcctgacgtcccggatgaaggaatgattttcctgcattcggatcgtacttttctttcttatgaagtcctactttatcgaagaattcttctacgacacccttcatagtgaagaagtcgccttcgccatacataccaagtgtgaactgtactctttcatccggcagttctgtaagtggaagtgcctttggaagataaatgttagccagttcgtataattttacgtctttatttcttctgttatagtttgttgcaagtgatgtcagcataccattcaaagaagatgtacgcatgatactataatcttctcccagtggattcatgatcggaatagccttacgaagatcagaatcttccggaatcagaagcttgtcaaataccttcgggctttcgaatgaatatgtcattccctggctgaatccgcagaactcagcgatatcacgtgcaacctgctctacccttaacttgaatgataattttcctgttgtagcttctccacttggaagtgtggtcggaatgttatcatatccgtagaatcttgcaacctcttccgcaaggtcagcgatgcggaataagtcatgacggaaagtaggtgcgatgacttcgcttgtctcttcatcgaattccagatcgatcttcttgaagtatccgatcatttcttctttagaaatgtctgttccaagcagcttgttgatcttttccgcatcaaatggtactcttacaggctctttcttcttgctgtatacatcaaccattcctccgacaacttcaccggctcccatctcttcgatcagctggcatgcacggtcaatggctgcctctgcattatttggatccagacccttctcaaatttaccggatgcatcggtacgaagtccgatcttcttgcttgatttacggatgttggttccatcaaagcaagctgcttcgaataacattgtctgaacatcgtctgtgatcatagagttttctccacccatgatacctgcgataccgatggatttcttaccgtcacagatcatcagtacagattcatccatctctctttcctgtccgtcaagagttgtgaatttctcacctttttctgcagtacgcactacaatttcttttccttcgatcgtatcaaggtcatatgcatgcattggctgtccgtattcttccattacatagtttgtaatatcaaccaggttgttgatcgggcggattcctacagaagccagacgtctctgcatccattttggagatggtccgatcttaatgttctttacgattcttgcacaatatcttgggcaaagttccggattcttaacggttactttgatataatctgctgcattctcatcatttcctgttggtgtgacaacaggtggatagaacgctttattaaatgtagctgctgcctctcttgcaatacctacaacactgaagcaatctacacggttagatgtgatctcatattctacaacgacatcatctaggccaagtgatttgatcgcactctctcctacaacggcatcatcatcaaaaatatagattccgtattccggagcctccggatacatatctctgttagagccaagttcttcgatggaacacatcataccatcactttcaacaccacggagttttccctttttgatcttgattccgccttctacacgctgtccaggctcatgtccgcctgctacacgtccgcctgctaatacaaccggtaccttgtctccctcttttacattcggagcgcctgttacgatctgaatcgtctctgttccgacatttacctggcagatgatcagtttatctgcatccgggtgtttctcaatcttgtcgatctgtccgatcacgatcttatcaagatctgcatctaatttctcataaccttcgacttttgtaccagacaaagtcattgcatctgtatattcctgagctgttacatcaagatccggaacatacgcttttatccatgataatgaagtattcatttataaatctccttttcgtattattacttgtgctcgctagaactgttttaagaatctgatatcattttcgtataacagtctcatatcatcgatctcgtacttcagaagtgcgatacgttccagtcctacaccgaatgcgaatcctgtatattcttccggatcaattccgcacatttccagtacgtgtggatgtaccataccacatccgaggatctcgatccatccggatcctttacagaaacggcatccttttccaccgcatttgaagcagcttacatccatctcggcacttggctctgtgaatgggaaatgatgtggtctgaattttgtctttgtgtcttctccgaataattcttttgcaaatacttccagtgttccctttaagtcagcaaatgaaatattcttgtcgatgatcagtccttcgatctgatggaaagaaggtgaatgtgttgcatctacttcgtctgaacggaatacacgtcccggtgacaggatacagattggaagcttgccctgctccataatacgtgcctgtacaggagatgtctgtgtcctgagcacgatgtctttattaatatagaatgtgtcctgctcatcctttgccggatgtccgtccgggatgttcagtttacggaagttgtactcatcatactcgatctcaggtccttctacgacttcgtatcccatacctgtaaatacacgctctacttcttccagtgcgattgtattcggatgacggtgtccgacgcagtttttcttagccggaagtgttacatcgatcacttcttttttcagcttttctgcacggattgctttttccatcttttctttattttcttccagaacagcttcgatcgctgctcttgtctcatttaccatctgtccaaccttcggtctgtcctccggtgcaacgtctttcataccttttaatacagcggtaagttcaccttttttaccaaggaactttacacgcacatcattcagtttttcaggcatatcggcagcttcaattgctttcaatgcttcctctttgatgttctgcagtttttctttcatcattttcttcctttcttcgcatatcttttatgtcagcgtatgcttttgggtatgcaagagaacctgccactggcagcttctcttgcatgctttggcataaaaaaagccccgccccaaaagggacgagacatataacccgtggtaccaccctgattcccgcaaaatatttttgcggacactcattactgcgtaacgtgcatcatacggcattctctacttttatttcaagaacacagctcgcgcgggaaattcattcaccatctgaacccaagggaactttcagcctgtcgattccctctctctagcggaaaatggctcactacttacacggtcattgcctttatctcataatacttaattattgtatcacatgaacagaagttgtcaagtcagaaattctactcctgctccatatcccgcaggatcacattcacttccccgccaagcagcaaaatatacatacagaagtacagccacaacatgatcagtacaattgtcgtcaaacttccatacatagatgaaaatcccttaaaaatattcagatagaccgagaagatccatgatacgatcatccatccgactgctgaaaatgccgcacccatcaactgaactttcaactgtacaatgtggttcggcaaaaatttatagatcatcattgtaaacacaaacagcaataccggtgtaatgattccacgtatctgcataatctgatccacaaagcgttccataagcggataatgttccgttacaaacagattcaatgtattaccaaatactgataacaccagcagaaagataattacaataataaacgcaactgtataaaacgttgcgcgtattcttaaaataatataattacgtgtctccttacagtcgtaaacgcaattcagacctgtcgtcagtgccagtacacctttcccggccgaccagagtgcaacgataatggtcagtgaaatgataccgccggactgattatatacctgattcacaatggatgtgatcaggctgtctactgattttggaaacacctgaaggacagccgtcataacgtctgccttcgtaaccggcgtatactgtaccagtgtgatcaacagtaatatgatcggaatcagactgagcatgaagaaatacgctgcctgtgcagcataggcacctacatgatctttcccgacttgttcggttatttccattactttatcatatagaaacttaacttttttcatctttttctcccaaaatattcgtctctatattctacccgattttctttcgtttgtctattagaaatcattccgtttccaggtgtgtttttctcaactattcttccattgattatacttatttttcaattgttgttcctggatagaacatttgtaatatttcctgataattcttccctgttttcgccatttcatttgctccattctggctcataccaatgccatgaccgtatccaccgcctatgattttgaatatattaccagcctttttcactttaaaaaatgcgcttggaagcagcgtaccactttgggcaactgtaccatcctgtttctttatttcatatccatttccccccagcgcctttcgtatcttattctctgtatcaactgtaatacttcccttatcaccgacagcttttatctgcagcgcgacacctcccggtcctgttttcgttacttctaatgactgtaccgtcccgatattcttttttacattctccgccaaaagtgcactcaatatatcctgatctatatcagcttcccaccggtaccatggaagtaatttttcataatctccattcttatcttttacttctaccgactgaagatatccattactttcattttcactcgttccccaggctttcatggttgttgtctttccgcaagatgttgaataataatacgttgttacaatattacctttatattttaacacctcgctggcagtttcccttaccgcttctgtggatgcatcctgctgtgccgaattattatatacctgataatctgtgctgtcattgacatgcgcctgatattccggataagcatagtcttccatctggcgttccgcgtaatttcttgcgcagactgcctgtgcctttaaggcctctttctgataggatgccggcatttcactgggaacaactttgcatagataactttccaccggaagttcattgataattactattccttctgatgttgcataaagatccagtattccggcataagaaggatttccatatcctctcctgatgcttctgacaaccatctctcccccatcttttgctgttactctgatttttccattctgaaatccgaaatcttcctttgtgatcgttattttctcattttctgcagtctcttccctggtaccagttttttctattataagacctcccgttgcactgacctttaattctttatgtacaatctgtttatatccatcggtcatgagcaatatcctgatatttttctgtgctgcctccgtactctctgattttttctggtctttctttttatcatttttcttttcagatacagatttcagtaattcttcccatctgctctgaatagatatttcagaatgcgtttgctcttttcccacagcactttcttctatgcctgctttcaagcctccgatcacacacaataacagtaaaatccatgctatatagatactgtaatgctttttattccgtctccgcaattttctttcctttcttcccgccctttatacccgaaaaaagacagccgtaaaaacgactgtcttttatcttttgtatattccccaaaatgccggttcctgtattctgactcctagcacccagctaggtgggtatccgcatctgcttttctgccttccactgcaaaatcgatggcctgacatattacagagatgtaagactcccgtttaaagtattgtaggttcaaaactacaggagtgtcgaacattccaggtttccactgcacttattataacccatttacatggattttacaaccctataacattatccgattttaatcagattcattagtggatcttataactgtggtcctgctgaaactaaagctttacctgcttcatttccttcatatttagcaaagttcttgatgaatcttgcagcaagatcttttgccttttcttcccactcagatgcatctgcatatgtgtcacgaggatcaaggattcctgtatcaacacctgtaagttctgtaggtacttcaaagttgaagtatgggattgtctttgttggaacattcttgatatctccgttcaggatagcatcgatgattccacgagtatctttgatagagatacgttttcctgttccgttccatcctgtgttaacaagataagcttttgcaccgctcttctccatcttcttaacaagttcctctgcatattttgtaggatgcagttccaggaatgcctgtccgaagcaagctgagaatgttggtgtaggttctgtgattccacgctctgtaccagcaagttttgctgtaaatcctgacaggaagtagtactgtgtctgttctggtgtcagtacagataccggaggaagtactccgaatgcatcagcagaaaggaagattacattcttagctgcaggtgctgaagataccggacgtacaatattttcaatatgattgattgggtaagatacacgtgtattctctgttacactcttatctgcgaaatcaatctttccattctcatcaagtgttacgttctcaagaagagcgttacgtttgattgcgttgtagatatctggctcagattctttgtcaaggttgataaccttagcgtagcatccaccttcaaagttgaatactccgttgtcatcccatccgtgctcatcatcaccgatcaggagacgcttaggatctgtagaaagtgttgtctttcctgttcctgaaagtccgaagaagattgctgtattctctccgttcaggtctgtgttagctgagcagtgcatagaagccattcccttaagtgggaggaagtagttcatcatagagaacatacctttcttcatctctccgccgtaccatgtattcacgataacctgctctttgcttgtgatgttgaacattactgctgtctctgagttcagtcctaattctttgtaattttcaacttttgctttagaagcattgtatactacgaagtctggctcaaagttttcaagctcttcttctgaaggtttgatgaacatatttgttacgaaatgagcctgccatgcaacttctacgatgaaacggattgccatacgtgtatctttgtttgctccgcagaatgcatctacaacataaagttttttgttagaaagttctttgatcgcaatatcttttactgctttccaagcttcctgtgttgcaggatggttatcattcttatattcatcagatgtccaccatacagtatcttttgaattctcatcaactacgatgaacttatcttttggagaacgtccagtgtagatacctgtcattacattgactgcaccaagttcactttcctgtcctttttcaaaaccttcgagttctggttttgtctcttcctcaaataataattcataagaaggattgtgtacgatttctgtcgttcctgaaatgccatacttgcttaaatcgattttagccatcttcatttaacctcttttcttttatttgctgctgtatatttataaattctagtcttgttatattctcccacaacagcatttgttttattattgcatttttctacgcaaaagtcaatactttaacaatcttttcacaatgtgtttttgcaagttctttctctaaaacttttattttttatcctattttttgttttaaaagcacaaaatgcaagattccacacgaaatcttgcattttatgtatttttatcaatacagaaaatatatttatcattttgtaaacgttctatacttccagaatattcttcactgtatctttcatcttatcagcatcacattccagatcatgcagaatatttgcattcaggatatctttgatcgcctgcggcatctcacgtcctgatgtttcttccagaaccttcagaagactgaactcatcctgatctgcatacttcggatcaattgcactcatgacactcttcacgaatttatatggacttgctgttgatgcaatcacgcatttcttattgtctccactgttcttctgataacattcacacacataagatgctacacttgtatgtgtatccatcacataccctgtcttatcatatactttcttgatattctgcgcacactcttcttctgtcgcatatccagctgcgaaatcatcaagacgtgccttcatatcttctgtaattgtatattttcctgtggattttaatgcttccatcatatcttttgtcttctggtcatcatctccgctgatccgataaagcaggcgttccaggttgcttgaaatcaggatatccatagatggtgatgttgtgaggataaactcacggtttctgtcataatcacctgtctggaagaagtcaaataacactttattgtcattcgatgcacataccagtttatcgattgggactcccatctgttttgcatagtatgcagccaggatattaccaaagttaccggtcggaactactacattgatcttctcaccgtcttcaatctcttcattttccagaagtttggcatatgcattgacataatataccacctggggaaccagacgtccgatattgatcgagttggctgatgagaactgatagcctttcttcgcaagttcttctgcaagttctttatcctcgaacatggcttttacaccactctgggcattatcgaaattgccatggatcgctactacatttacattttcgcctctctgtgtcaccatctgaagttcctgcactttgctgactccgttcttaggatagaatacgatgatccttgttccttccacatctgcaaatccggcaagtgcagcttttcctgtatctccggatgtggcagtcaggattacgatttcattctttacatcattcttctttgctgaagtcgtcatcagatgtggcagaatagataacgccatatctttgaacgcgatcgttgcaccatggaataattccatataataagtatcatctacttttacaagcggtgcgatctcttctgtgtcaaatttgctgtcataagctttatcgatacagcttttcagttcttcttccgtaaaatctgtcaggaactgtttcattacaagatatgcgatctcctgatatgtctttcctttcagatccgacattgatacatccagtttcggaagttctgatggtacaaaaagtcctccgtccggggcaagtcccttcagaattgcttcagatgctgttactttcagattcgaatttcttgtacttttgtaatataaacccatgccaatgctctccttatatgattactttctcttgctgtttgtatattttacaagtccacctgcagcgatcagtttctgcatgaattcagggaaaggctgtccctggaattccataccttttgttctgtcgtaaatcttaccgctgtcaaagtcgatctctacttcatcacctgcttcgattgcttttgccgcttccggacactcaatgatcggaagtccgatattgatcgcattacgatagaaaattcttgcaaacgtctctgcgataacgcagctgacacctgctgtcttaagacataatggcgcatgttctcttgaagaaccgcatccaaagttcttgttggcaacaataatatctccaggctgtactttatttacaaattcagggtcgatatctgccattgcatggcttgcaagttcctgtgcatcgaatgaattcagatatcttgcaggaatgattacgtctgtatctacgttatctccgtatttaaaaacatgtcctaaagctttcattatttgtcacctactttctctgggttagcgatatatcctgcgattgcacttgctgctgctacttccggtgatgccagataaatcagggaatctacatgccccattcttcctacgaaattacggtttgttgtagatacacatttttctcctgctgccataacacccatatgtccacccatacaaggtccacagcttggtgtgttgactgcacatcctgcgtctacgaagatttccagaaggccttctctgatacactgtttgtagattttctgtgttgccggaacgaccataacacgtacatccggatgaacagtatgtccctgaagaatggcagctgcttttctcatatcttccattcttccgtttgtacaggatccgatcacgacctgatcgatcttgattggttccattgcttcgatctcgtcaatcgtcttcgcattgcccggaagatgcggaaatgctactgttggacggacttcggaaagatcgatctctacaacactttcatattctgcgtcctcatctgcttcgtacactttatattctttctttgtatgttcttttaagtattcttctgtcttttcatctaccgggaatattccgttcttggctccggcttcgattgccatgtttgccattgtgaatctgtctgccatagaaagattcttaattccgtctccggtaaattccatggatttgtaaagagctccgtccacaccgatcttaccgatgatatggatgatgatatctttaccacttacatatttgccaggctttcctgtcagtacgaacttgatcgcactcggaactttgaaccacagttctcccattgccatacctgttgcaatatcggttgttccgacacctgttgagaatgcacccagcgcaccatatgtacaggtatgggaatctgcgccaatgatacattcccctgctgcaacaactccggcctccggaaggattgcatgttctactcctgattttccctgttcaaaataccagctaagtccctgattctttgcaaattcacggatcgattttgagttctctgctgatttgatatctttattcggtgtaaagtggtctggtaccagtaccaccttgtctttgtcaaatactttgtctgccatctgtctgaagattggcagagccataggacctgtgatgtcatttgccatgactacatctaactttgcttctattaactgaccggctgtcacgctgtcaagacctgcatgagctgccagtatcttctgtgtcatcgtcattcccataacgaacctgtacctccttgatctctcatagttttatactgtattttagcacagtaaaaaagggcatgcaagaaattataaattttagtgcataatttttcacttctgtttcttgatattatgcagatatgggatctcaatcggatcgatcggagtagccggattttcaatttttcccttcagagttcttttgtgtttcttaaggagcgcaccacctttgttgtagaaccagaaagaatatgtcagaattttatgggccggtcccatcttgtcttttgccgtctttccatagagtactccgcctgcttcaatcgcagctttactccgtatcaatgcgatcagttctgtctcacaggtaactctttccggaagaatcgtatagcctgtcccgatgcagtccggtctgtgtgcatcgcttccccctattcccggctttttatatttttccgcaagctttcttgcaccttcgttcgattctgcagattcacatgcattaaaagcctctataaagtcaaatcgcttgatcagttccggtgacttatagaatctgctggtattcgtaaagctcaggtacttttctccgcatggatgtgcaggtcctaagattccaccatgtctgtgcacaaagtcgatcagcacagacaccggaagtcccttcacttccaggagacgcatcttaacaccttccggcatgatacagataatatgacctgcatccagtgtatcatattcgattcccttcagaactacgaagtcttcatgtacctttcctttcatgtgatatttccagtgacgatagccatgataagtgtcatgatccgtgatcagcattccgtcaaatcctttttctttcaaggttgtgatgtattcatccaagcttacccggctgtccactgagccttcccgcacatggcaatgcatatctatcttcataagtaagcctccttaactttattcttaatagtattatatcacatccctcttaaattacaacgaaactgcttcccggctttcttatatctttcttaatctgatctttcttaatctgatctgtcaaaataatacatcctgcctgtaggtaacagtttctattgcatatttcggtataaaaaatacctgatgcagtttttaattttctgcaccaggtgtttttcttatcacattcgtatatagaaattaccgtctgtgtcggattttcttcattaatcaatatcgtcaggatgaaaaactacaacatctgaatcatctgtttcaaaaatctccacatcatcttcatccagaaatccgtcttccggctcatccgttttttcaactgtcacaacatcttcatcgtcgtccagattatcttcatctggcttcgtatcatccagatcaaatatttctgtcacagtctcttccttatctgtatcttcagcattatccgttttttctttatccccggctgcttccatactttcttccggctctccatcatctaaaagcattcttgctttttcaacctcagactccatagatacctgttctttgatcttctttgagaatatcttttctttctttccaatctttctggactgcatcatcgtctgaactacaattccgatcactgcgattgctgcactcatcacatatccgatccagccaatcttcgtcattccacacacaaacggtaatgccattccagcctctacaccgcccatgatgccagtcacaaatataacaaaaaactcagcaaaaattaccgtaagtatcgcaacgatcagagcgataaccgcacaaatagcaagtactatcactgactttgtttcaagcagcgtaacaaatgtgccgaaggatccgaaaaatgtcataataaagattccaaatttgcgaagtgccgcacacataacgcataatattaccgcacacactgcaaccgccacaagcatttttgtcatatcaaagccggcaatcactcctaccgttgctccaataactgctcccacagccagtcctacaagtgccgataacacccttacaattttcagtccaaacaaagctatgattactcctaccacaactgttgcgatcaaagcccccataatttccggcgtctttcctgcaacaaagatactcgtgggtccgtctgccgatttcaaaactgatgttacattctccatatccatactcctttctcttatacccctcattatacataaccaccgctgtcggttttgtattctcaaaagtataaaaggccgtgtttccgaagattcacagcctctggttccatatctgcctttagaatgctactgctcccgttgatgttccgttaattacataataaacagctgactcttctggctttatgtataaatccattgtcttgatatctccgattttgtttccagaagatgtccatgctttttttactcttgcaatgatttctttttcttccacctgttttccatagtattcaacaaaagcacttactttaatctctttctttgctgtagatttcttagctgttgttttctttgtcgttgtcttcttagctgtcgtctttttagcaggtgctttttcttctgcttttttggcagttacttttttttctgctgttttcttttctgctgccttaggctcggttttcttctcttctgctttcttctcagcctttttttcttccggcttagctttttcttcttttacaattgagtttactggctctgcctttggagctgcgactttcttctcagtctccttctctatcttcttcggctctgctgctgccactaccttcactgtctctgctttttttactgtctctgctttttctgatgtcttagtttctggtgcagttactttagcagttacatcttttgtggttgctgttgttactttttttgtagccattttatttcctcctaaatctctctaagccttattacctagttgtcaatattataacacattcttccaaaaatgcaattccacgccatattacatgcacattacacaccaaacatctctaaaatcagccctgctgccacagcaattccatataatactgcaataatctttacgttttctttcttatccggatttaccttaaacaaaacgaccagaccaattccggcccctgtacacaatcccgcaataaccgatgcaaatgaaattgctccacttaaatatagctgtgtcaaaatcacagatgccgcacagttagggagcaatccgatcaatgctgcgatcaccggctggaatactgtatcccccagcatcatagcagaaatcctgtcaattcccagtacttcaatacacagatttaaaataaatgtaaatacaaataaatataagaatatctttccggtatgacgaagtgccggctttacaattccggatgaatgattgtgacatccacagtcatgacagagttctccttcatgatgtggaactgcaatttcctttttaaagaaaatatccaccagatatcctgcaacgatcgcaatgatcactttcgccagaagcaatataccaatcttgccggcatgctccggatttcccataataataagaattgcttcgtccgatgttgccagaaatacagcaatcaatgttccgatcgtaataatccctccagaatatagattggctgccataactgaaaatccacactgtggaacacatcctactactgctcctactaccggtccggccttatctacttttatcataagcttttttgtaaaatcactggaatagtgttccagtgcctctatcagcagaaaggccagaaacagaaacgggagcatcttaatacagtcaatcgccgcatcagtaaatacatcaattagcatttccataatttctatctctcctttatctattttttcataacatttttattctagtttgtatgtccgtatttttcaagcaaaacatgccattcggcattacatattttttctcagttattctgtaattttcagtcttttttctgtataatacattatatatagactattttcacagaagggacgtgatcatatgagtacttttgacgaatccggtccggtcttccgggtcttgactctatgcttgattccatccgtatgggcgataatgtcgtctggcaggtatccagcatggatgactatatgcactttgtaactccactctgtaaccagctttatgaagaaggaaaggaacttttatacatgcatttttccggacaccctgctcttcttcatacattgcagcaggcttaccaatatcctgtcgatatctaattcaccatcaatggaactgataccggtgaatttgtatttaacctgttacagtgcagaccgcttcaggtcggcgcaagaagagatgccgtaaccgttccttcgctcccggaagataaaacagtgttctccgttaccggttcttccatgggcgggtcccgggcagaagatattgactatgtagtcttcgtcgactccagggcttattatgaattcccgtataaacggaaaccagatatcgcccatattatcggagacatcaatcatcatttccgcaaaagcaatcagaacctgcttttgttcgtacctggacgtatcggaacttcctcaccggaacttggggttcctgtaagctttgccgcgatcaatcacttctgtgcaatctgcgaaatgtcggacagtgaagttggatacatgccggagctttcttacggaagccatatgttccaggatctggtagaggcagagattttttacaccgcgttatttgacactccaaagacacggatttttaatcgtactgtttttcacgatatgcctaacattctcacggaaatactgccggattgtaaagagtatgaagacattgtaaaagtatgccatacggaaggcatgcatttgaagttatactcagatattcagaacagtgaaaccgtactgggattcgaatcataatcaaatacatcacaacacacaagaaatgagcagcgtacactgctcatttctgttttatacattattagattatattcattgtcagttatcttttatagattccctccagtatatctacggtcccttcaattccaagaaggcttgcattcaacaatatctcatgagaactgatgcttccccattcctgccccgtatgggtttcgtaatagtatttccgttctctgtccattcgtttaatgcggtcgagagccttcttctcagacacatcgtatctttctgcaatacgtttgatacggtcagccctgtcagcacagataaatacattgatacagttcggattatccttcaagatatagtccgcacatcttccaacaattacacatggtccgcgttctgcaagctttttgataatttccgtctgtaattcatacatctgttcagataacggctgtacatattcttccgaattaatataggaagaatatcccatcggtgtgatcagataactggatacaaaactgttaagagaagtctcatcaattgcctttgccgtctcttctctgatatccatcttctctgctgccattctgacaagattgttatcatataacggaatatccagtcttgttgcaagaaggttgccaatctcatggccaccgcttccaaactgtctgcctattgttatgatcttatgtgtcgtcataggtatccctccttcggatgaaagtatcacgatttctttgtccctattatacctgtttccgtcagaaaataccatatatttcattcaattattctgtcaatttttatactgcctgtcgcctttcctctaccagaaatcctttttccctcagctcctgctcaatcagatccagcgtctcttcgctgtcggcactgaccttatgataatgatagttggatgtgatgttcttaagcggactggacttgccacttcggatatcttccataaatgcgccgacctttctccgggaacttaaggccagttccgcctccatctttccatagactctgtgatggatcatgacattgtctacacatcctcccaggtcaacgatcgtattcagctcttcttccagctgttcatctgtgtgctgtactttaaatatacggcacactgtcttcggctgattcaatatatagccgcggtttgtagatatgatctcatatcctgctgcccggatcagtgcaatatcctgcacgatcacctgacggctgacactataaagggaagcaagctttgttccggataccggagctttgctttcctgaatctgtctgattatctgttctcttctttcagatccatgcatttcctgttgccacctcccatgttattttcccaaatgatctatttatccatgtatttttctccacacacggtaatcacatctattataccgcatgaaggtgctttaaggaaatatctaaaatcggtgcggaatgtgtcagtgctccgctggaaatataatctacgccgagagaagtcagtctgctgatattctctttcgttacattaccggaacactcggtctcggcacgtccgtcaatgatgcggattgcttcctgcatctcttccgtggacatattatcgagcatgataatgtctgcccctgcttctaccgcttctttcaccatatccagattttcaacttctacctcgatcttacgtacaaatggtgcatattcttttgccatctgaacagcttttgtcacgcttcctgctgcaccgatgtgattgtctttcagcaacactccatcagacagattataacggtgattgtatccgccacccactctgactgcatatttttcaagaattctcatattcggagtcgtctttctggtatccagaagttttgtcttacttccctccagaagcgatgctacggaatgtgtataacttgcgattccactcattctctgcagataattcagcgcaactctttctccggaaaggagtacacggatatctccggttactttccccattaactgtccattctttacttcatcgccatctttgcagaaaaattctacttttgtatctttatctaataattcgaagactctctgaaatatctgaagtcctgcgatcacaccatcctgtttacagatcagatctacttctccggttacagcttcgtgcatgaccgcattggtggtcacgtcctcacttgaaatatcttctcttaatgcttccatgatcaggtggtctacctgtaaagtcattgttatgttattcatattatgcttgtctcctttatcattcttcctgttcgtctgtttctgtccttttcctgtttatttttctattcattttttgacagatagcaatttttatctatgcatccgtatactgcatttattataacatcttataccgctttacgttcagatattttttcctgtgtttcttcttttgtaatctttgttgctgcgcgctttgcaaataccagactttccagaagtgagttacttgccagacggttagcaccatgtacaccattacagcttgtctccccgactgcatacaggtgttccatagaagtcctgctgtctgaatctacccagattccacccataaaataatgctgtgccggtacaaccgggatgcattctttcgttacgtcatatccttcttccagacaatgttcatagatatttgggaaatgctttaaaatcgtttcttttggtatatgttccatagaaagccatacatgatcagttccttctttttccatctcttctctgattgcttttgtcacaacatctcttggaagcagttcgtctacaaaacgttctttgttcttattataaaggaccgctccttcaccacgtaccgattctgagatcaggaaacgtcttcccggtttcttggaatataaagttgtcggatggatctgtacatagtccagatgttccagacggattccatgcttctttgcaatctcaatcgcatcccctgtcagatgtggaaaattcgtggaatgctgataggttccgccgataccgccacttgcaaggatcgtattttctgcataaatttcatacgttcccttttcattctttgccttgattcctacacatttatcatcttcgatgatcacatctgtcatctctgtatattcatacattttcacattttcaagcttctttacctgtgccagcagcttgctggtgatttcttttcctgtcacatcttcatgaaacaggattctcggtctggagtgcgctccctctcttgtataggcaaattcgccgtccttcttttcaaactctacgccatactttaccagatcattgatgatatctctggaattacggatcatgatatctacagattctttccggttctcataatgaccggctttcatcgtgtcttcaaaataactgtcgtagtcgctttcgtctcttaatacacagattcccccctgtgcaaggaacgaatcactgctttccagatctgacttggtaattaatataatatcctgttctcttggtaaattcaacgcgctgaaaagtcctgcgactccgcttcctacgattactgtatctgcattcagtttcataatacaacatcctcttttctatactgctttccgtttacggccagttcctccacttatataattctgaccgcttaaactttccacattataccactgttatttacatgtgacaagacagttgttgtatttattctttacacgtgattttctatttaatacatcatgacggctgtcaccgatcgaacctttgtatgtaaccagaaggttagaatgtaagatatgcttaatcagcagatacaacacaatcgtaaatgcaaacaaatacccaaacgtaccaccccccgacattcccatatctctgccttcatatcggtcgtgcagataatgcttgagctgatcagaagcagctatcacctagagtcctattaccacatgtctttccagcatcgtaagcccctgcggcatgctggttttattctccttcatgacttccatcaaatccatcttcacttccataacgtcaatttctaccatatcatagccgtctgcaagaattttttctttgtcatcaattgcaggtccttcgatgtattacatgaccagcgcatgcatggtcgtatattcctgaatttgtaaacaaaaaagattattgtgccggaatttcatttctgtatcacaataatcttttttatttatacctatttatacaaattctccccatcagatttgataacaccctgataccagtaaaagctatcttttttatagcggtttaatgtaccgccttcttcctcttcacggtctacatatacgaaaccataacgtttctgataaccatttaaccagcttaaaagatctgtgaatgaccatgtacagtatgccagaacttcacagccttcttcaattgcttttcccagttctttcaaatgttcttccagataatggattctatattcatcatgaatctgatcatcttctgtctttttatcaaatgctcccaatccattttcagaaatcacaattggcagaccataacggcttgtaatttcacggcagcaaaagcgaagccccatcggatctatcgtccaatcccaatctgttgtcataagatatggatttactggattcttatatattccctgcattcccagttcttgggcagatccctttacacctgttgtattcatcgtaccatacggcgtaactccatccattggattatactcacacacacaactctgataataatttacacccatgaatgtaatctctccggcagcttttttcaatatctccatatcttcatctaaaatttccggagcataaccttttttcttcagataagccatcgcagcttttggataacgtccatatgcatatatatccatccaccagaaatttttcaattcatcataatcacgttttgccattgcatttaccggtttacagtccaacgcataggatggtacatacgcaaagcttgcaccaatctctccttttccacccatttcacgataagcaagtacagccctggcatgtgccataaaagcataatgattaacctgataaaaagtcttctggtcatcaaattttccaggcgggtgctgtgctgtcaaccaaccaagagaagtaaatatattctgttcgtttaatgtaatccagtatttcactttatcgccaaagttttcgaagagagtctttgcataagtcacataatcctgaatgatctccgggctttcccatccaccatacagatccaccagtgcctgcggaagatcccagtggaaaattgtcaccatcggctcaattccatatttcaagcattcatcaataatatcctgataaaatgcaagtcctttttcattgaccgtacctcttccttccggataaatacgggcccaggagatagaaaaccggtatgtttttaatcccatctctgccattaatgcaatatcctctttatagtggtgataatgatctaccgctacatcaccggtcgttgctttatatgttttccctgggatacgtacaaatgtatcccagtttgtcacaccttttccatcttctttccatccgccttcaatctgataagctgctgaagcgcttccccatagaaagtcttttggaaatcttgtcactttcatttcttccatatccatattcctttcctttactgaactttgataaggttactttcctttgttacttctcctgttgctgttttttcaactattgcatactgatctgtgtttgaaacgatcaccggcgttgttacatcatatccagcctcttttattttttcaatatcaaattcgatcaacacatcaccctttttcacaacatctcctgctgctttcttcggtgagaaatattttccttccagatttacggtatcgattccgatgtgtaccagaagttctaccccattctctcctacaagacctactgcatgtcccgtttcaaacatcacatctacttttccatcaaatggtgcatagatcactcctttttccggaacgattgccgcaccttttccaagaatttcctgtgcaaatgttgcatctgcaacttctgacagtgaaattgcttttccttctgccggacttgcaatatcaatcgcattctccattacttttacttcttctttgctttctgtttccagcatgtctaattcatcatcattttcatctactacatcttcaaatccaatgatcattgtcgcaatgaatgcaaccactattgtaaggagaatcgtaagtgctgcaaataacagactctgcggtttccctttttctacatactgaacgattgttacgatcgcaggtgtcgcaataccaaaacatttcatctggaaaaatccaccaaataatccacctgcagcagcaccgatacatgctcctaacatcggacgtttcaaacgtaatgttacaccatacagagctggctctgtaattcctgcaaataatgccgaaaatgcagaagatccggcaatctgtttaaaatctttgttcttactctttactgctactgcaagcgatgcagcaccctgtgccatgttagagcaaagttctccgatacagataaagttttcaaatcctgtggaagcaatcattcccagtttgattggtgtaaatgcatgatgcatacctgccataacaacgaaaggatatacacccgccacaagaccgatcgcaataaatccaagtttatcatgaattgtataaacaactgttgataatacgttaccacagattgcacctaaaggtccaagaataatcaatgcaataggtgcttcgatcagcactaccaacatcggttttaagaagttcttggttactaccggtgtaatcttatctaccagacgctcgacatatttcagcgaccatactgccagaataatcggaataacagaataagcataagatgcatatgttaccggaataaatttaagaaattttacagtttcttttgcatcatttgcactattcatgaatgaaataaaatttggatgcaacataatcaacgctatacttgccgcataatacatattcgttccaaattttttagatgcagatatcgcaatcaataccggcataaagaaaaatgcgccgtcacccataacacttaacagattataagtatcaccttttgtactcagaacaccgatcattggaagtaatgtaagaagtactttgatcattgcagctccgatgattgccggaataaccggtgccatgataccggagattgtatccatcagcatagaaaatacattctgtttttccttattctgtggtgcttttttcggtacttcgtttgaaaaatttccaagcttattaagctctgcatagacatttgccacatcattaccgatgataatctgatactgaccggcttttttcatgattcccataacgcctttggtctttttcactgcttcatcgtctacaattgattcatcttttaatgtaaaacgcagtctcgtcatacaatgtaccaggctgattacattttcctttcccccgactctttggaggattttttttgctatactttcgtaatccattttcatttacctcaattttcttttttattttttcatatatataacaaagacccgacttaaaagagcatacgcttcccgggaccgctgctttcttttaagtcaggtcttgcttaactgaataataacaaacctgcaatctattctgattgttcatctaatattcttttaatgtgtattaataaatataatctttcatctattgtcaatttgtaggaatactgtttttcaatatattccacaatttttctgactcctgaataagcatattcattctcttctatcaatactttgtatatttcctgcatgctgtcttgataaatggtattatcaaatactctggtcgcaaaaaatttcaaatgagttagaaaccgttcatacgatatcgatttctcgttaaattctatcttaaaatggattctgacaatctgaagaactgcattaatcaatttcgtaatcttattaacatctacattacttccgctgccaagttcggccgaaacgatgtgcatcgctataaatgcagcttcgtcttcccctagattctcatcattttgttcctgtatccattgtactgcccttaatccaatttcatattcttttggataaaatttacggatctcaagtttcatcatattttttaatgctatattctcacgatatctgtcaactgcggaattgatatgatctgtaagtgtcacatacagggaatccctgactttcaatccttcctccctcgctgtctttacgatacggcttacaatctccaaatattcttctgatatttcttttactacttcctgcagtctcctgctgtcatcgacactctccagataataagttttatccgccagtgcttcatccagattttcacccttctttttcttgaacccgattcctgctcctgttatgatcagttctcttccctcctgatcactactgacaactgcattcgtattcagaactctgactattttcacagccattctcacctctaattcaatcttaacaaccattgatacaatatgataaaaaaagactgctcataatacaaaatctcttgatctcttgcactataaacagtcttgcttaccattacgtaataacaaacttgttattatattaccaataatacctgtctttgtctatattctttttatttttcgtcataactaataaatttaccattttctttttgtgtattttcacaagtattttattcctttcttctcaataatgaacttcacttcacctttctgcctttcttttattctagtgaagctctgatatcatcattccagaaagcattagggcaactacttttctcttctctcttctctctcctcttctttttatattcaattacttctgtcatacgtttctatgcgttcttttgatcattccacattcttcaatgcttcatccatcggaactttcttaatcttgcggtattcaagaagtgctaccacaccataagtaatgaatcctgtcaggaacatttccacatatatctttggatcgatccacagtgtgatccatccggtcagactttccatcatcattacacggaagattacattcataaccaccgtttcaatcggaagacttaagagcagttctattacaaccacaaccatggttgacataatatacagcctgctgatctctccgttcgtatatccaaggatcttcgtcatggaaatggactgcgcatttttctcgataatgatctttgacaacagataaatgacaatcatatagatcatgatcgcaaatccattgaccagtcccatcatatttcccatggatacatccagctgtcttgataccttcgtcagtgcttccagatcaactacagaccctatgtatttctcatcaatgtctttaatctttgtatttgcaaaatatcccgcataataatcacttccaagatcaaatgtctcgtttaatttgtcacggctcataaatacactgattgccccgctgtaatcatagactccttttactttgaatgtgtagcgtttgcgttcgtatttttcttttaatgtaatcttatctcccggttctacttgatacttatctgcatatgccgtcgatatatatacgccatctcccagatctgccttaatatacttactgtccggttctactccgtacaatactacctcttcgctcttggcctctcccggaattgtatttaatgcgtatgcactgaatttttctgctgtcttgttatccgtcttcgtgccgttcgaatactgcatcagcgatagtaaactttccagtttacttccactgattgcatccgtcggaacctccagcatatactggtactttgccagcatattttcctgtatttcttcctgataatggttcagtaccgacgggagcagcaatccgaagaataacagcagatttgcaaatataattcctacaaacagcaccaaataattactgatattctgaaaaataactctcagacggaatctgcggaagataccgagttttgtacttaaatgaactgcccttttttgttttctggaagaaagatctcttcttatgaacttaagcggcgacagtcttaatttgtaatgtaaaattccatagttgatcaccagcatgataataaccggtacaaccgttgtcatccagaatgcttctgcattccagaccgttacatatgtcggaaggctgtaacttccatagtacatccccgcacatacctgctttaatactgtatatccgagaatatttccgaccagtgccccgatcagtgtgatcacaaccggaagtgccatataatgtaagatcaattcgcgccttgtatacccggatgcacgcagtgttccgatcacgcccgcttctttcctgatcgtattgctgatcgtaataccgaatacaaatgcaagaatcgccattacaatataaagcagcataacgatcatcgcacggtcgcttcccatatcatcccctgtaaaatggatcgactgattctggtattgtggtacaaaactttctatcgtcacgacatctgccatgtcttccatcaggtcttcggccatcttcttttcttttttctctgttgcaggttttttatcatagatccaggcataattatactgtacctttacctgattcaatgcttcaaaatctttgtctgtaacaattgccactccgaactttacagcatcaaacatcgtatcattattattctgaaataatgcactgtaatcggaaagtgccacaagacctgtaatccggaatgtcttctttcgacttttcaccgtatccccgactttcagctcattattatctgcatacatacggtccacagcgatctcaccggactttttcggcatcttcccattcatcaggcagaccttatctacctctttccggttcttgaaaaatcgtatggtacttccgttcgtaagcttttgctctatataaaaattctcatatacctttacatccgatttttcaatatcttctttctgcgccggagtcagcttcttcttcgtctggaaatatccgtcttcgatattgtatttttgaaagctgtcatcatatgcccggagcatacttccatcagctaccaggaatcctgatacgaaaccaatcgttattgccatcatgataaagacaactaaatactttccaaattcactttttaattctctcggcaatctttttcttaaaggacttttcatctgttatgtcctccttaccattccagattgatcgccggaatctttacttcatttctgtaattcttccgaatcattccgtctcttaacttcactacccggtcggccatgtctttgatcgcatcattatgtgtaaccatgataatcgtattgccatatctctgatttaccgtctcgatcagtttcaggatttccttggacgtatgataatccagcgcaccggtcggctcatcgcacaacaggatatccggattcttgacaattgcacgtccgatcgcagttctctgctgctgtcctcctgataactgattcggcagttttttctgatgttcataaagaccaagcgtatgtaacaattcatccacatctaacggatgatcactcaaatatgcccctacttcaatattctcccgtaccgtcagattcggtatcaggttatacatctgaaaaatatatcccagatgctttcttctatacagtgaaagtttcttctccgtcatatcctccagacgttcgccttcaatcgtgatactgccctcatcagcaccatcaattccccctatgatattcagaagtgttgatttacccgaaccggatggtccaagcaagacacaaaattctcctttttcaatatccagatccagacctttcaacacgttcacacggctgtcgcctgtcccgaatgactttttaattcctcttatttccagaaacataattctcctcccttcagttaccttcctataaccaatgttagtttaaacttatttatttgtcaacgaaatccttttttagaatgtcttcatccggaattttcgtcagatttttcctaatttatctttatatttttgcatatttggtattaaaaaaaggatgactctctacttatgtcatccttttcattctcaacttatctgaacctatcctgattctttttcttattacattttcttatatcgaaacaatcgctttgaactgatcacagtcaatcttgatatcaaattctcctcccagtgctttcgcataggtacttacgattgcaagtcccagtccgttaccctcactggttcttgccttgtcgcctcttgaaaaccgttcgatgatatcttctttttcaaaatccatctcatatccggatgtattcgtaatctccaataccattttctgatctgttcccgcttcctttttatacgtcttgacaaataccctggttcctttcgccgaatacttcagcgcattttcgattagattctgacagatcctgtaaaaataagaattatcagaataaattgccgtatcttcttcggtaaactgagttacaaatttcagtccgctttcttttatccggtcatccatatctgcaaatatctgttccatcagacgattaagctcaaaagtttctttgtgaagttctacattcccactgctcgcttttgccagcaaaaacaggctgttgatcatctcaccaagctttcctgctcttgtcgatatcacgtctacatagtccctcactacatcacttaattcttcttttttgatcagttccagatatccgacgatggaagtcagcggcgtctttagatcatgcgatacatttgtgatcaagtctactcttaactggtcacttctcgataccttttccagactcttccgttcaatctccagcgcctgttccagacgcttctgaaagaagctctccgtctgctccatgatctgatccagctcatttctccagtatctctggatcacttcccggcagcagatatattctataaacaccgttgctaccatcatatatccggctgcataattccatccccatccgctgctgtaactgataaagaaaagatatgccgctgctgccgacagttctaccgccagtatattccgaaatcttttttccgactgtttttctttcgccttccaggtctgataatagatactgtcttctgtatcctgcagataggtctctgcactccctttctgactccagttccgatatctcagtttcatatacctgcgtacgagcaggcagattcccggctgcaccaggatattgccgatcaagcagattctccatacgccccatgtactgaaataatatctgttcactaacaccacaaagaacaggaagcttccaattataaacagcagaaatccaaatacgcaatcataatattcttttataaactttttaattgcttttaccatatttttccattttgtatccaattccccacaccacctttacatatcttggcttcttcgcatcaatctccactttttccctgatatgacggatatgtaccattacagtattctctacagtataatctgctgtttcctgccatacattctcatagatctgctctgccggaaatacctgcccgggatgcgccatcaatagctccaggatcttatactccgttgccgtcagatgcacttcttctccttcaacaaagatgactctctgctttttatccagtaccagaccgccattcacgatctgatccggatctttctttttctccgtttctccaccgctccatgcgcggtatctgcgtaaatgcgctttcactctggcgatcagctccgcaggattatacggcttctcaatatagtcatctgctccgagcgtaagtcccgacaccttatcactttcttccgtcttggccgacaggatgattaccggaatcctgcttttctcacgcagcttcatcagtgccgacagaccgttgagtcttggcatcatcacatccagaaggatcaggtctacattctcccgctccataatatccagtgcttccataccgtcatatgctttcaaagtctcatacccttcatactttaacagttcactgatggagtagacgatttctttgttatcatctactactaatattttttctgcctccatttctttcgtctctcccctctttttctttgcatgcttactatatcgttcatgatttaaatatttcccgatacaattcttaaaaatttcttatgattaatcttcgctatgcaaggacgaataaaatgcgattccaagtatcactgcacctccgaccagttctctgaccgtagggatttctcttaagaagatcagtgcaaatacgatcccgtataccgtctccataccggaaatgattcccgcagtctgcgcttttacacctttctgcgccgttacatataaagaataggcaatcgccgtacataaaaaaccaattgttgcaacacctgcgaaatccaccggacgccattctgctttcaccagtaccaacgccggaagcaatgcaattgctgctgttccctgttcatacagacagatggtacgtcctttgtatctgctggaaaaataccggtttgataacgtcattactgcataagtaaaacttgccagcattccccagagaattccactcgtcactttattctccactgaaaattccggaatcgtgatcaatactcccatcaaaaggatcaaagcattcaaaatattcttaccgcgtatcttctcatggaataataaaggttccagaaatgtcagaaacagtgggaaagttgaaaatgtaatggtcccgattgccacggacgatgtctggatcgattgaaagaaactagaccagtggattgccatcacaacacctgtcaaaatcataagtccgtaatctttcttcgaatccagtgtcagcttgtctttacacaccagcgatattgccagtaaaagtaacgacgaacagatgactcttcccattgccacctgtaccgccggaacctgtacatactgaccgatcacgccggagcagctaaaacacataaccgcaatatgcagcagtatcacattctttcttgtatctttgctcattgatttctcactcatatctttctcccatgtatctcttgtgtatttttatttattttcattcccgaccagtataacacattctcaccagtctccgctctgtctatttataattcttcacaagttcttccttctctttccggcagatcagatgatacgtcacatccgcctccggatccgtcagcggaatgacctttcttcccttcagaagatggttcacatccgttgcaaaattcgtggtaaaacaaaagacacctgcacaggttgctcttcgcttcctgatccagagtggcgttgttgtaattccaaagtccgttcataaagaacgtatggaagagaactttaatgtatttgattttacactttctgaggaagatatgaagacactggaagctctggatggcggagagagtctgttcttctcacatcacgatccggctacggtggagtggtttatgagtattgtttagattcaaaaattgtgtgccttaaaagctatgtagccccgtaggaaaaatataataggatgctggttccgttcacttcgttcaaagtcacctgcatcctattatatttttcctacggggctgcgtagttttttgtgatttttaaatcatgttcttttttcggagaatacatccaggaatttttttacggtctctgacagtgcttcgtttttgcgccagatcaggacgcatcagctgtcttgacagtgtcggctgtgtaatatgaagaagctttgctgttcttgtaatattctcttcacgcgctgccatcagaaagtatttcaacacccgaagttccatacttttttgctcctgtttatccgtttttcttttcatatgctcattgtagcttatttttgttcgtacgaaaagcaattgtcatgattgttcatatataaatttgatattttcatagatcagtgaaaaatcgaccacacattttccatcgaatatccgcacaggtacctgatctgtaaatccatatatcactggtatctcgactttctccagatcatacacaatcacttttttcttatccggatccaccagccagtattctcttacccccgctttctgatacttcataagcttcagataactgtccttcttccttgtactttcagacaggatctcaataataaaatccggcgcaccgaaaaccccctgtctggtaagcttttttctgtcacagacgatcataagatccggctgtaccatcgttttatcgtcctgatccagttgtacatccaccggcgcaaacattggaatacaagcgccttggttcttttcaatgtatccgacaagcgaactatatatcttggatgccagcagctgatgtacactaagcggtgctaccatgtcatatatcgttccatcgatcagttcggcgctttcatcttccggaagtttccgataatcctctattgtatattcgccttgtttcttctttgttgccacataataaccgctttcttcttttacgctctccggatagatatccggatggctgtcctccagatatgttccagaacattttttcttttctttttccatatcatcttgtttcatcgcttcatctcaccctcgatccacgtcatgatgacatccaccagatattcctgctgcaccttacttaactctttgcccggacgcatcttatgccatttatatatgcatcccctgcagcatgtcgcggttgcatgttgtgctatgaataccgggtgtccccgcatcggcgtctgctttccgtcattggggatcactgcaggtgcttctctctttgcaataaaatcttcggcgtgacgccggatggtatccatacccttttcacgtatatatgccttgtccttttctttcagatgaaaactgtttctgaatttggactgttccagacgggaaaataattgctgataccattcttcctttgtcatctttttcatgcctcttttcatttgtaaatgtgtttcaacctatcttagatactatattaacatatactagatgatttttccactttatagatctaacatatattacgtttcatatataaaagcggatacggattaccttcctcatcacactccgttctcttatatgtctgaaatcccagatgttcatagaatccaacagcctgtggattctgttcattgaccgttacttcctggtttgatgtgattttccagaatggattcgtatttgacataagttgcttcctcaatctgataaatactcacgagtcacactaccggaagattctaacatttctttcggcgtccctgtaaagagaatctcgccgccagcctgacctccttccggtccaagttcaacaatatagtccgcatccttcataacgtcaagactatgttcgataataaacagcgtattgccctggtccgtcatcttgttgaaaagtttcatcagccgtctgatgtcatccagatgcagtccgtctgtcggttcatccagaatgaagatctgtccgcgctcttcaagcttgtccgccagctttacacgctgcagttctccacccgaaagtgtcgtcatagactgattcagatgcagatatcccagtccaacctgctccagcatatcgagtttattgacgaaatcagtgttttcaaaaaaccgaattgcctgacgtacagtcatattcataacttcagcaatgttttttcccttatactgatacttcagcacttcttccgaatacctagttccatgacatacctcacaaaccgtctcaatagaatccatataggccatatccgatataataaccccttttccctggcatacaggacatgcccctttggaattaaagctgaaatatgaccgtgcaatatgattttccttagcaaacagagccctgatcttatctgcaatgtccagataggtagccggggtcgatcttaaattgatccctatatctttctgtctgattgaaataacctctcccggatactggctggtaaaatattccatcagcgaactttttccggaaccggccacgccggcaatgactgtcataacgccaagtggaagtttcacatttacattctttagattatgaagattggcatgctcgagctgataccagcctgtcggctttctatattccatttttaccggcgtttttgtccgcagcatacgccctgtcaccgtatcagcctttaaaagtccttcgtaactgccctggtacataatctgtccaccgtttataccggcttccggtcccatatccacaatatgatccgccaatgcaataatttcccggtgatgttccacgatcagaactgtatttccatgttcttttaatttgatcagggaatttttcagcttctggatatctcttgaatgcagtcctacacttggctcatccagtacatacatcatatctgtaagcggtgaattgatatatctggcaattttaatccgctgtgcctcgccgccggaaagtgtatccgttccccggctgagcgaaagataacccagaccaatctcagtaagcgcattcatccgttttaagatctccgtttttatgtcacgtgccagcggatcctcaatctgacggataaattctgctgcctcaggaatcggcatatcggaaacttcacagatattcttgccattgatcaggcagctgcggatctttgcattcagtctggctccatggcagaccggacatgtaaatgtgctgacaatccgatccagttctttcttatgaagctgcccttctttggatgtgatgatactgcggtacatacgcggataaattccttcatatttcgcagatttcggccagttatccggtggatttttaagacggatctgcggagaataaaggaacagatccatctcttcttttgaataatctttaatcttcttattcagatcaaacagaccgctgtaagcatatcgtttccatctccaggctccggttgtaaatgcgggccatttaataaccccttcatcgtttaaacatttatcaaaatctacaagcttgtgtatatctaattctgtcacaactccaagaccttcgcagcgctcacattttccgcttggatgattgaaggaaaaactatccgaatatccgacaaaaggttttccgacacgagaaaaaagcaggcgcagcaacgcataaatatcggtgtaagtaccaaccgtagacctcgaattagcagccggttttttctgatcgattacgatcgtgaccggaagattttccatgcggtctacttccgggcggccatatttgggcaaaaactgctgcacaaaacttggaaatgttacattcagttcccttctcgattctgccgcaatcgtatccagacaaagagaagactttcccgaaccggatactccggtaaaaactgtgatttgtttcttgggaatttttaaagaaacgtgttttaaattattttctgtcgcattgataatatttataaaatcctgttcgttattttccatttttctgttcctttcgctcataaaaggcatttggattcgtgtactgtccatgccttttctaagtaatccgcctccttcgtttcatcttttttatatagttaaatttcgatttttatttttgtttccatagcatggtgtactctttttcaccagtagcttcatccaaaccttcgcattgaataatgaacccttccctttggtaaaaagaaattgctctggtattcttctggtatacatttaattgtaatctaacttttttatccttaatataatccaacaaaagcttacctatgccacatgaccgcatttcttcagcgacaaaaataccttcgatatattcatcatttagtcctacaaatccttgtatcattttatccgcttcaaacacatagacttcggattgtgacaccatttctttcactaattcataattacttgtccagtatcgattggaaataaaataatgtgctttcagatttgtctttaaccatatatcagcaactctatctacatctccgttcagcaactttctaatcataacaaatattctccccaactacatcctttatgcttttctcttttttccattctatcacaagctcaccattaattatcaattttttgatattttttcttttcccccactgtaaaacagcctctgagcgtttcgttatatagagggatacaaataagggcaagatccacccatgtttaacagtaatgtcgtttgccatcctgttctcctatgggatttatcttgatggggatttccccataccctctcaataacagacgtttcacttgtctgttggttccacctaaaggtgttcacagcactatttctaatatcggaagggacagccgatattgaaatacgtgaactcccggcgggaggaatagtctcagcggaaggaggagtatgagaacaaaaacaaaaatatcttcttagtgcagcttatctcgccaagaaactgaactacaaactactattccatcttcataggaagagattccatcatgtgaaaactgttctggatactctatatcactaagtttctcgtttacataattattaaaattacgatatctattctgttcattaaattgtcctgatttcatcgaattatatatttcttcaagaatacaatatttttcatcttcatacacccaacaatagtatttttgattttttacagactcacattgatatacctgatttaatgaatccacatacgaaacaaatgcttgataatacataaagcattctttatcaaaattaatttctaagttaacttctccctttccttctggatccacatcatgtatattccatactttatctataccagagtatgcgtcaaaacatgaacaaattacatgtttgctatctttttgtgggtaatacatctggtttgttgatgtatccttaattgaacccacattatttaattgtacttttgcatgctcgattgtctttttcctaacattcttattacaagtccccttactttcaaataaaaatacttttttttgcccatcaactccgatccaatctggtgccatttttccattcaccaacgttcctttaaaactcttatctgtaaaatgatataatttgttaatgttatatatttcatttgcaataattcttgttgctaacatacccatggcaaaagaaattacatttttatatgaagtttccgcaaattcatactcatctgaaattacataaaaccctttttccttttttactgccattctacacattgatgaataaaattttcttgcatctcgagaaatcagtttttttccgtaaaatccatttaaaatagcatatttactaaaatctcctcttgaaacgttaaatgatctatgtttggttgcattaggattttttgaataatcattctctgaatcaaaatattcataattcacactttccatctattttccttctccttatcagatgtaaatttttttgatatcattttattaacttatcatttttcttcattctatcacagcatctattcttccgccatcagtctttcaaaccagctatccaatagcaatgataaattggcctacatctggcaattcttgcagcatttcgtccagagttttctgtttcacatatttctgcacatacacccaacaggcaagtactctatggagcaatcactccggaagtaccggcttccatccttcagttacataatgatgtaacaatcgttgctgatgaagctgcactgagtgagattgataaataatatctactggacaccggacattgcagtgtaacttatgaaacgcatttagcttttgttaaaaaagggaagctgtgatacacatccatataccacaacttccctatattttcatcttcatttaattttaatcaattgtccatttaagcagctgttctttcaccttttcaaatatctgcattacaactactaacacaattaccataaagataaatccaacccaggtatgcaagatgatacactctacaatatgacggataatacagaataccaggccaatctgtttgctgccgatctgctgattgaagatgaggaaatcgaagatatggttcagaacgaggacctggattatttcggactctgcagttcattgaatgcgactccggaactaatgagctttaaattatacagcctgacaaaacgaggccaggcttatcatatgccgatggagattcagagcaatttcctggcgaaataaagtaaataaagatcctgttctatatatcatagtatgaacaggatctttttataatgatttattttctatctaaaattttattaaaccgactaaagactccatagtttgtgtgtttgacttactgtttatatctatcttctcctaaatatttttctagtcattgcaatataaaattgcttatacagtctctcccttaagagtcctggtattctggataatatacagagcgaccgatatgaccatcattatagcacacaaaccaatcaacagatctgataccatcggtgtaatgtggaaccatataatatgcaccgctgcagttccatataataaaaaggttactatctttccatgccagtctgcaccatgtacttttcctgtctttcgtatcacaagacatccactgactgccatatacagctccttacctgccattgttacgattaaaagaagcatatgcggaaaccgagtaaacagacagattaacatcgctgcctgtgtcagcttatcggccaccggatcaagtatttttcccaaattactaatcatatggaatcttcttgcgatatatccatcagcaagatccgtaagaccagacagcaataagatttctccagctaacagaggatttttctttacacaatagctccatataattaccggaatcaggcaaagccgaaaaaaagaaagaagattaggaaccgtaataattctattcaaattttcttcctgattcacttcactctgcatgtacggtcgcctcactttcctttttttttgacataaaccaataaaatataacacaaaatgctaatgcaaacacaacaccaaaaacattttgaatcactctaagactaaccgctccttgtagtccataagtctctgcagcaatggctaaagcaccaaatgtgttaaatactgcctgccagccatattgtgctgaaagtcctacaccgattccaccaagaattcctatatatgcatagattgacgaaggaagcagaaaatataatactgtaaaacatataacacctgcaatatttccgacaatccttttacggactctgtagtgcatatcttccataaatggcaaaatcgcggacatggccgcaataccagcccacattgcacgtggcatattacaaagttctgcaatgcaaaggacaatcggtacgcataaaatctgacatatctgccattttgttctggaagaagtgatatcaaattcttgtatcagatctttcagatttcttttataagttctgtttttatgatttcgataaaatacgaagcaggtaagtgctgcacctaaagccattccgactaatcgcatctgatagctttttcccgtaacatcataaccatatagcagcagatacccaagaaccaatgtagattgattaaacatgaatggattatggcatccgaacagaatcaacacagccagtgccgcaatatttaacagcattcccaataccggtgaaaactgatttgctaaatgcggacatacagtcataattacaaagaacaaagccaaaagcatcgtagattgtccggtgtggatccccagatccgcattccgaaataccataaggcataataaaactactacacccacaatactattctcatttccaaataagatactgaaaatagtaacaaataaaaaacaaaatgccattgtaacagctatctttaccaaatataccagtatatgatatgatttttctttcactgtttcactctttttcaacagatttttagaacctgcctgatttaactgcaattcctgataaaatgtcatgtaattcctcctctatctgtttttcttaaacttatatggcctcatctttctgtattggaagctctacaacaaatctgcatccaccatattcacggttttctgctttgattgttcctccggcactatctacaatccgttttacaagtgcaagacctaggccatttccttctgctttatgagatccatctacctgatagaacttgtcaaatattctggattttacatcatcctctattcctggtccttcatcttccagaatgaacttaacagaatcctgttcttgtttcagaaacatcgtaattgtcccctttgaagggctgaacttaatcgcattatccaaaagatttatccagatatgcataaaaagtccttcattcccagtatatttaacttcctccaattctacctgaaaaccaatttctttttctgtccattttgtttccaatgaaagaaatgcctggcggatctgttcatccagacgatattctgtttttttcattggtatattctgattctctaacttggataacagcaaaatattaccaaccaatccggaaagtctttgggtgttaaataagattttttctacatattcctcttgatccggagacagttcttctccctgaagcagcattgtatatccttcaatggcattaatcggggtcttaaactcatgagaaacattagatacaaaatccatctgcagcacctctgttgcacgaagttcttttgtcataacgttaaaactttgataagattctccaacttctgctatacggctgttcgtttccaaatgctgttcaaaatctccccgagaaacttccttcattgctttactaagcctagtaattggttccagtaactttgcattaataaaggaagtgatcagccctgcaatcaatgtattgaaaatcaaaagccagccaagcacaggtatgctgcccggcagattaaaaaaatgattcaaaaaagcaaataataaagcagatataactgttgaaaatacaagtgccagccagattgcaccagtcagacaggatcggatccgcaatcctttttctttcttttgttccattattttttcaccaccttgtatccaattccacgcattgttacaatttcaaaatccgggttatctttaaaacgctctctgattcttcctatatgtacctctatcgtatgtgggtctgcctccgtctcgtatccccatacttcatccatcaactgttgttttgtaaatgttctgcctggcgaagttgcaagcttatataaaagcaggaattcttttttaggcaaaacaagactttccttatcagttgtaaccgtcattgcatcataatcaaactctgttgaaccgatcacaattttgtgttcattcagtatctgtgcacggcgaagcagtgctccgactcttaaaaccatttcattcacatttaccggttttaccatataatcgtcacttcccgaaagaaatccctggcgcatatcatcaaaggaacctttcgcagtgatcataagcactggtatctgatatcctgctgagcgaagttctgacaccagttcatagccatccataaccggcatcataatatcagaaatgatcagatcaatatattccttatccaatacttctaatgcctgtgctccatccgatgcacttttgacttgatatccattcttctcaagcactttttggaatagctggcttaattctttatcatcttctacaatcaatatttgaaacacgttttccttcctccttattaaaacagataccttgcccatccaagcagatgctgtaccaaaaatatttttctctgacgtttctttgttaattcgattggctctacatgatatggatcacgataggttccatcttccaatacctggcgggacactctttcatattccatcatgccctcttccagctgtttattaatatctttactgcgtattacaagcatcagttccgtatccagatatgcacttctcatgtccatattaaaggaaccgattacagacagatcatcgtcaatcagaatactttttccgtggtatgaataaccgccttcatattcccagatattaattcctgtacttaagattctatttctgtttttcgcataatcggcagacccaaatggattcccattattcgcaactgaatttgtcatgatagaaaaatctgaaacgttctctgcaatctcctcccatgtattatacatcatatcattacagataatatatggcgtgtggatcttcacacgattttttgcatttttcattaattctcccaactgataccacactactggttctttggaacctgtgtgaataggatttgacactaatgcaatcttttctgtctcaaaagtttcgtccgtgtaatcagtatcgcagattctttccttattctcttcaaaatatttctgatagccgttctgcagctctaaaactgcgttctttacagattttctatttgccagttttttattgtcatgaaaataatcactgtcttcctgattccatatggtttcaaaatactctgacaactggttaactgaattttctttctcaggttcatcgcaaaccactaacacgtctctgtcatagttcttatgtcccggaaaatcacccaggaaataattgtatgtatttcttcccccaagaatatatctctttccatctgcaatcaaatatttatcatgcattctacccatcattttccacggtttcaacggattggccttattatacagtttaatttcaacattctcatgggaagataatccatagaaatacggatttccttccatatcaatccagctctccattccatctactaacagacgaatatgtacacctctgtctgccgcatcatgcaatgctcctaaaatcaattttccactttcatcggattgaaatgcaaaagtagaaagaataatttccttttttgcattcttgatcaaacgcactctttgtaaaagcgcttctggattcttttctatgattactgcccgttctgtattttcactgcattcgttccatgacccattttttgtttcttttttggttgtattggacacttccggctgctttttatatgcaacgcagattccgagcaattcataaaaagccacacataaaaaaattgccagtataacaagaaggattttacatattttatgctttttcattgtacatcacctgcttcctttttatttcatacttatacaatacaaagtcaatctcaatttaacctcaacaaaatttatttttcataaaaaaatatgaccggcttctttttaaagaaacagtcatatttttattctaatatatgaaggagcttttcttactccgttgtattaatcactatccatgcaaaatcttctttgtacaacagactgttagatatagcaaaaacggcctttcaaaaacagttaacttctaaatcaactgttttttgaaaggtcgtttcatcagattcttatagcaatccagcaaataatctcataaataattgtcccagtcgcaaatatgcacttcgtccggtttgatattggtctgtcacatcacgacattctcccatcgttcttatcagatcattttttatttccacaactgcctgacaatctgccataaaacagccgttttcaaaatggtgatataaacttcgataatccagattaattgttccacaagttgccatacagtcatctgccacactcatttttgcatgacagaaaccaggagtccactcataaacacgaacaccatgtttaactaatccatgataaaaagaacgagttatattataaatgaattttttatcagggataccaggtgtgataattcttacgtctacccctcgcttagcagccagacataacgcatgcgtcatttcatctgttatgattagatatggagtcataaaccaacaatatttttcagctttattaatcatactgatataaacttcttctcctacttgctcattatccatagggctgtctgcataaggttgaacaaacccagtttgctgtgccgcataatcatagtggaaaaggtatttactaaaatcagaatcattagcatccttatcacttactgcattccacatttccaaaaatgtcaccgtaagcgactgaacagcatctccttctaaacgaatacctgtatctttccactgtccatacgggtgtgtgtaattaaaatattcgtttgctagattatatccacctgtaaatccgacttttccatcaataactgttatttttctatgatcacgattgttcaaaaacagatttaaacctggcataaacggattgaatacacggcaatgaattcctattgcttccatctttttcacaaaatctgtgttaataaagcctatagaacccatatcatcgtagaatactctaacttccacacctgcttttactcgctcttccagaacatcttgaatcttatgccatgcttcagcgtcttctatcgcatgatattccataaagataaacttctgtgctttctccaaatccttaagctgtgcctctaatcctttcactgcttcatcaaaatacacaatatccgtattctgatagattggatactgcgaatttctttgtatgtaacttgctatatttcctgctttcggaattttttcttttattttgctcaaacactcctgactgtccggaagcattggtaacaatttgctatcaatttctgcatatcgctcacgcattttatgtgtgccaccattcaaaccaatcaacaaatacaggcctacacccataattgggaaaattagaattaagatgacccaaggcattttcatagaggatgtcttatttgatgcgtacaatcccaaaaccaagatcccactcaaaatccttgtaaataaatttatgatttctgcatattcattcaagcgtgttacgatagtaataataaaaatcacttccagaagaatgcagattatggaaaaacacagccgttttaccccattttttgtttttgctttgccctctaaagtatcttgtttcatatatattccaccttcctacttgctcagttttcttcctaaatttcgtggaacataccaattttgtcttttattctctgcatttcattatctgcttcaatgatagctcttgcagaatgaagtaattcttcacttatctcatcatagccaggcatttcttcaattccttttttatagcgaagttgatgttccaatgttgcccagaaatccataccattggttcgaatctgtaattctacacgcataggtgttttacccttagcaaaaaatactggtatttcaacaatcatatgatagcttcgataaccattcgattttggattttttatataatcttttatttcaataactttaatatcatcctgttgggtaatcaaatctgatatcatataaatatcgtcaataaacgcacaaactattcgaacgcctgctacatcattgagatatgtctgtatattttctgttgtaaattcatatcccatcttctgcagtttatcgtaaatactattgggctgcttaattcttgtttttataaaagaaataggatttcgattgttctcaactgaaaattcatcatccaaaacctcaagtttagtttgtatctcccgaatagcacaacgatacatcatcattaaattataaaattttgtagcattatttaaaaactgtagtgattccggactgttcatcctgagtttttttacttcatcttttgtcatggaactttcctttctacctcatccctgatttcaaaacattatttattttgatagttgattcgttctccttgaattactggataacaaatcattttatcactatccagattttctacatgcatatctactgcactgatctgatggttttcataagtattgtaataataaataccttttgtaacattacaacacgacgtatacaatgtgatttcatattttccatccgctacttcgcaacatcctcgttgctgatccacagatccgagaatgtggaagaattggctaacgctttcttcctctgattcacctgaaattgcatttacctttgtaaaagctacacgtacaaagcgtgaggaagatgagagatctcccggaagacctaatcctcccatacctctactatatgcatcaagagccaaattttcgcagaaagtatttctgggctgtttaggagataaatacatataattatttagttgaaacatctgctgtggaaatggaggattattcgtaagcactcctactggattgtcataaatatgcaaaccatctgacatagattctaccgtaattgactcattctcatcagaaatgatccagtgtaattgtgctaatggtaattgctcgctgaaaggagtattaacaatattaattcgttcaagaagctcgcgaacttcaactaaagaagaacactgacttaaaatccacggaataaattcaaactgtgcaatattttccacatctggcttaatcgcggcataaacagcatttccgacaaaattcagtcctgccattgccactcctttttcattcatagcatcataatacaaaggataatcctcagcaacatgagccattccaataattgcataatgatttttcatatcgccaacatggcgaaaattaaacgcataattacgtggtgtaattactatctgatcaccataagagaattcataatcgagggttcgtccaaagtaaaaatcttttgttttataagttgctgctgtacacatgattgtttatcctcctaaatagattgaaatatgtcaatgagctttttcttgaacaatattatagcacaattcttttattttgttccaacttcatacatgatcataacatgtaaactttaaactattttcctagattatttctccatcagttttgcaaaccagatatccatagctaggatgaattgacctacgtctggcaattcttgcagcatttcgtttagggttttgtgcttcacatatttctgcacatacacccaacaggcaacgctactggcttctgatacaatgtcagctatggttttgcgcataagctcttcaaattcagcaatttctttttttggaacaacatcatacagtgttggtgcctgatgacttaattttacgccattttcatttgcatctttaagcagattcttaactttttctcttgagttctccagtactttcatgtactcccagataaatgctaccacatcggacggtgtgtctttttttagtggtggtaactgaatataatccttgttttcgctcattttcatattctcctcacgatataataaaatcaataatacgttctcttgtcatgtccagtacagtatctacaaacactcctgcaaacaggatcagatacagaattacactcagcgaaaatagaaatgcaacctgtacccagtcatgataacagtatgcagtcgctataatcaataaagtgaatataaatccaaggatccctctgacaaccgcataagtctgtactgtcatttttactgccaagccgatcacaaaaaggatcagccataccgacagtaataatatctttccagcaagttttaaaataaacatgtgcacctcctatcttaccagtcctggcatatcatggttcacctctgcctgataatacccgttcatcgttgacggtgcattaaacagggctgctaataaatatttcttgatgttcttcacctttgtggtgttaccactcatacagtgtaagacatactcgatatgtgaataggtcagcatcagaaattttttcttcaccagtgatgccggataccagttgctggcaatcaagatcttgtcatttttacacatcacagtctctacgatcaggttcacgatttcatctacctgccgcatatcgtcatgatgggttacttccagtgattcataatcaatggtctctttgacaaggttttcataagcctgataatcctcagagcggttatcgccatcggatcgattctcatctgcagatacgatttgattagatttattatcattcatttcagtatcactaagattagtattattagggtttgaaatgtaaacttcttgaagtttgttttcgggacctctagaagtttgatttttggacttcatgaagtttgaattgtaaacttctgtagattcctcattttccacagaagtttgttttttaaacttctgtgattcctctccaaattttttctcatctgttttctcaggcataaaggttttcacgtagataacgttcacctttccaaatccctgtctgcgtttctcaatcagaccaattcctgtttcgtcatccagttctctcatggatttaatggctttatttctgccacagttcagtaattccatgatatcttcgatggaaaagtagatatatgctctgtttttgtcgtcaaaccactgattcttgatggaaagagacattcgatccaacatcagtccatataaaattttagcatcgctcgataaatctttaaaataactgtctgtaaataatgcttttggtatgcggtagaagctgaactgatcagcttcggtaccgtaaaaataattaaatgtcatttttttctccataatttcctcctttcattttctgctaagaagtcctctttttaaacttctttgactttgttttcttagctttttctatccttaacaggactgttcctgcatccatttttctaataatgattcaatcacctgttccatatctttggctgtataatcatccagaaagtactttgtcagtttcttttctgagaaggtaagagaccgggatactttctttgccatcacacagttattgaaaatcgataacatctggatctgattgatacagtcgatcaggatataatcgtatcggcatcgtatcgcatcgatatattctttcatgatcatttctctgctcataacatttcccatcgttacttccagtgcggaaagctcaatatttgccgggagaagatctacattttcctggtgatgtaaaatcccatcttccagagagatttcttcttcgttgatgacatccatcatgatcgttgccaatgtgatgcgaagatcatccggttcctcatatccaagacttgcggttaaacttccctgtggatccgcgtcgatcagcaacactttcttaccttctcttgccagtccaatgcctacatttacggttgtggtggtctttccgacgccacctttctggtttactacggatataactttacacatgatttcttcctcctttaactttcccatgattcttttttccataatttcaacagtgccagtatttcccgtttcatcattgccggtgtataagaatttggaaaatacttgtgcaactgctcgtttgtgaatgccactcttgtgatctcaccctttttcacttcacacatgatctcttccatcttttccagtgacaactgtttttctttactcagttgccggatcctctgggcctgtgagagtgatggaattgcctgtgcatactccattgctacaagcagttctctttgttctttttcacttaatgcagctatctctacagccggacaaaaagaaataatctcatcatccagtttctgcaacatttccggtatcagttttgtcagtgagatataacgctgcacttgttttgggctatcaccacaatcttcactgatgatttctattgcccgctttcttggtgttttgtggtcaacttggctcttttttcgaccactttttctttttaatacgtcattcttcagtttgtaagcaaaagctttttcactgtagctaatccgttctctgtgaagattggaatctaccatgctcaagatggaatcatcttcacttaatacccggatgattaccggtactttacggtatcccaatttctccgcagcatgttttcttctgtgaccggatatgatctcatagtatccatccggtactggtctgacgattagcggatttaaaattccatacttctcaatgctttcctgcaaaagaaacatttccttatcatcttttacctgaaacgggtgctctttgaacggacgaagacgcttaatctcaatttctatgattctttcttcgttttctcctgattgtctgtttggctcagtcatcttgactcctttcctccaggattcaggaaataaaaaatgcctgcctggaacttttatagatagtaaagttccaaacagacattgctgtttgaccattagctgtagctaatagaattgaatactgtttcagctaattcatgtttgcaagtttgggagagattgtttcttttcccgccttttctctgatttacatccccgaataagaggtgacaacggagcggaacccaaatgttagctggacttcttaaaacccatgtttgcaaaccggtaattttgattagctgtcagctaacaaaaatcggattgcgttagctggaaattgatcattttgaatggaattttgtgtcacgaacgtgatttgaaaataacaaaagcgttcgttgtcagctaatccagctaacattttcgaacgctttgaagcccgtcgccaagaggatttgaacctccgacccctcgcttaggagttccctgtggcggttagtatgcagtagttcgattatcctgtaagggacgtttaacgccccaaaaagcggaaaaggggcttgcacaacgactctgttaataaactctaatattcaattatatcctttagagtgttagcaggctgttagcaaaccaactactttttcgggaattacggacaatacgtacaaccgtattttaaatatcatttatcacaaagaaacaagatacccgttaggttaaattagtttaccaaaggcgttcagaaatgagcgtcttttttcataccaaaaatcgaaaggagaaagagaaaatatgaataagctagtaaagcgattgctgacaggaacgcttgcttttgcaaccattctcacggcattaccagtgacggcggttcatgcttccggcaatcaatactggacagaatcagcagaacgtgtcggctacattgaacacgttatgaatgacggttctatcaaatccacatttaatgagggacacatgaaagttgagggcgaaactgcctactgcgtggacatcaataccaatttcaagaatggatataaaacaaggtctgacgcaagtacacgtatgagtagtgatcagattgcggacgttgctctttccttagagtatgtcaagcaatataccgctactcatacagggctgaataacaaccagaagtatttgctggaacagtgtgttgtctggcagagattgagcgaacagctcggctggcagtgcgacaacgtcagagcttcctataatgaaatctcacaggcggtacagaatgaagtgtacgctggtgcgaaagcatttgtaaaagcaaataagggacgctatgaatgtggcggttacatttacactggcgaaggacaggacatcggacagttctgggcgaagttaaatgtgggaaatgcaaaggtcaaaaagacttcttccaatcccactgtcacagatggcaatgccaactattcttttgagagtgcgacatttggtgtctattctgataagggctgtaacagccagcttgccacacttactgccgatggaaacggcgataccaaagaagttgaggtaaaagccggaacagtttacatcaaagagctttctgctccaaaaggttacaagctggattctactgtccatgccttaaatgtggaagttggaaaaacagcgactttgactgttgccgacactccaaaagttacagaaactttgattgatttattcaaaattgacatggaaacaggcaaatccagtccacaaggaactgcttctttagagggtgcagagttcacatggagctattatgatggttactacaatgcagacaatcttcctgcaaaggctacccgtacatggacaaccaaaactgttgccgaaaaagacagtgacggaactatccattatgtatccagacttgccgacagctacaaagtatccggcgacagcttctatacacaggacggtaaaaatgtattgccacttggtacactcactgtcacagaaacaaaagcaccaaacggctacttattagatggtgcatatatgcaggctgacggaagttccgaacagattaagggaacgtaccttacacagatttccgaagatggcgaacttgccgtactttctggaagcaaccagtattccgtatctgacaaggttatccgtggcggtgtaaaaatccagaaacgtgaccttgaaacaaaggataccaaagcacagggaagtgcgaccttacagtacacagagttcaatattatttctttaaatgacagtcctgtactggttgtgggaaaattatacaacaagaatgaaaccgtaaagaagattcagacaggcattgacggaattgcttctacttcagccgacttgctcccttacggaaattacagattagaagaaagcaaagcaccagagggctacttgacagatggtgcaaaggcaatcgacttttctatcacggaagatggaaaaatcgtggacttgaccgacaaatcccactctgtctacaaccagattaaacgtggcgatattgagggtgtaaaaatcggtgcaggtacacacaaacgtcttgcaggtgttccattcagaattacaagcaagacaacgggagaatcccatattgtagttactgacaaaaacggtcagttctctactgcttcaagctgggcttcccacaaggtcaataccaatgccggaaaatccagtgaggacggtgtatggtttgggacatctgaaccagacgacagcaaaggtgcattactctatgatacctatgtgattgaggaattaaagtgtgattccaacgccggatttaagctgattccagcctttgaggtggtcgtatccagaaataaagtgaccgtagatttagggacactgaccgatgaatacgaaaaagaaatcacaatccataccacagctaccgacaagaaaacaggcgaaaaaatgattgttgccggaaaagccatcaagatcgtggacaaagtcacacttgatggcttggaaacaggcagaaaatataaactttccggctggcagatgttaaaggaagaaaacgccgaacttctgattgacgggaaacgtgtagacagtgattacactttcactgctgacagcgaaaaaatgacggttgagattacttacagttttgatggttcagctcttggcggtcagaaccttgttacctttgaggaattgtacgatatgagcaatccgaaagagcctgtcaaggttgccgaacataaggacatcaacgatgatggacagaccgttcttatcacggaacgtatcatcaaaatccatactaccgctacggacaagaacggcaaaaaagaaatcgaagccggaaaagatgtaacgattgtggataaagtcacattagatggtctggaagttggaacaaaatacaaactttccggctggcagatgttaaaaaaggaaaatgcaaaacttctgattgatggaaagaaagtatccaatgattatgagtttacagccgacaatgaaaaaatgacagttgagattgcctttacctttgatggttcttttcttggtggcaagagccttgtcacatttgaggaattatacgatatgactaatccagacgaaccaaagaaagtgacggaacataaggacatcacagacgatggacagactgtgacaatcaaggaagtgccggaagtcccagacacaccaaaggataccgacacgccggatacaccatctacgattactaagacaagtgacagtccaaaaacaggcgacaataccaatatctatgcttatcttgtcatgctcggtctttcctgcgtagggcttggcggtatgctttacttcaaacgccgtagaaagaaatcataaggcggtaaggtagcggttggtagagcgttcaaggtcgccaccctttttgcaacttcacgctcccgtgaagcacttggtttacaggagcgtgaagtccactaggggcgtggggagtgtagctccccacaacgtacagcaggaaagaaactaaaactgaaagaaaagaggtcaattatttatggaattaagatttgtcgtaccaaacatggaagagactttcgggaacttggagtttgccggagaaaacactacggaacagcagagaatcaacgggcgtatggctgtcattaccagaagctacaacctgtattccgatgtgcagagagccgatgatgtagttgtgacacttcctgccaaagctggcgaaaaacatttctcgccggagcagaaagtaaaacttatcaacccacgtattactaccgatggttataaaatcggggaacgtggatttgtcaattatatcctacttgcagacgatatgttaccagcagaaagtaaataaggaggtattcagattatgagattagcaaatggaatcgttattgataaagaaaagactttcggagtgttgaagttctccgcattacgccgtgaggttcatgtacaaaatgaagatggaacggtaagtgaggaaattaaggaacgtacctacgatttgaaatgcaacacacagggacgcatgatacaggtatccgttccagcgactgtgccgttaaaggactatgactacaacgccgaagtggaacttatcaaccctgtggcagatacggtagccaatgcaaattaccgtggtgcagatgtggactggtatgtaaaggcagatgacattgttccgaagaacaaaggcactcatgccggaaattcacagaacaatgctccacagcaaccgccgaagaaataagtctctaactaatggctttccattgtactgttcaaatgtaattgatataatgcattatataagtaaattggatttagttgatttggttaatccaatctaacgactgaaaggagcatataatggaatttagaaaagatttaggacagtatgtttatgaatatgagggactgctttttgcttgggacgaagagccagaagaagatattcaaaacactgtggagtcattagctgaaaattattttaagaacttggacgtgataattgattttatgctatctgatattaaagaaatatatggagaagttactgttgaagatgtaaaggaaaaacttggtaaacctgttattgattataataatgggaaagtgacttattatgaacaatcatttgatgattgccatatatttgagtttgaatttatggacgatgcctttgaagatttacagtatttttcaatagatggttagtgaaatatattttccattttacaatttaaaaaaattattgaaaggtcgtatatagatgaactttatagataaagcattatcagaaatcactaatggtgaggactttgttcaagcaatggcagatatttatgaacattcagaagcaagaagcgaattgcggaaatttccatcttggattagaaatatcataacagttattgattatgatacagaattatctatgaatgggttagactttaaatcttataagaatgttattgaggctctaaatgatataggattgatagaagaagcagaagcactaatcgcttttgaaagagattcttcacaagagggtgcagatatttgctattcaaaacttgctctcaataatgattatgaagcattttggaataaggtgtactcatatgctgacgaaaatataaagaaataatttatttttacaatttaatatttatgttcataaagcagttagtctacacgattgactgcttttcttatgtccaaagaaaggagtttatatgaaagtatggaaaaaacctaaaggtaacaggattcgtgccagtgataaatcactggtctatcatttctgtatcggctggctgttgctcttgttcgttgcggtattcctgctactgaacctgcgacagcttcttgtgacggactggaaagattttaacctgctccatgccggaattacttggactgcctacaattccattacggttctgatagcgattggtgtttgtgcattggtcgtttttctctactatcgttacggatatgaccgtatcaagcggttgctacacagacaaaagctggctcgcatggtgttggaaaacaaatggtatgaagcagaaaacaccaaagacagcgtttttttcactgacctgcaaagcagatcaagagaaaaaatcgtgtggtttccaaaaatttattatcagatggacaacggcttgctccatatcttgtgtgaaatcacaatgggaaaatatcaagaacagctcctgtccttagaggataaattagaatcggggctgtactgtgagctgaccgacaagacactgcatgacggctatatcgaatacaccctgctctatgatatgatagcgaaccgtatttcgattgatgaagtgatagccgaaaacggcggtctgcggttaatgaaaaatctggtgtgggaatatgattcacttccccatgcccttatctgcggtggtacaggtggtggaaagacctattttctgctgaccatcattgaagccctgcttagaaccaatgcggatttatacattcttgacccgaagaacgctgaccttgcagacttgggaacggtcatgggaaatgtctaccacacgaaagacgatatgattgactgcgtcaatgccttttatgagggcatggtcacacgctcggaagaaatgaaactgcacccgaattaccgcacaggagaaaactacgcctatctggggcttgctccacagttccttatctttgatgagtatgtggcgttcttggaaatgctcacgacaaaggaaagcaccgccctgttaagccagctaaagaaaattgtcatgctcggcagacaggctggatactttctaattgtggcttgccagcgtccagacgcaaagtattttggggacggtatcagagataacttcaacttccgtgtggggcttggtcgcatgagtgaactcggttacggtatgctctttggaagtgatgtgaaaaagcagtttttccagaagcgaatcaaagggcgtggatactgtgatgtgggaacaagtgtcatatcagaattttacactccccttgtacccaaaggctatgatttcttgggtacgattggggaacttgcagaaaggagagcagaaaaaaaggctctggaacaatccgaagccttactttaatttcaagatgtcattaggtgtgcagtccagatattcacacaactttgctaagatggagaagtcgattctggttactttatttttgcagtagttgttgagctgtgtcctctgtaaattacaggcttcacagactttatttttactgatattcttttctttgagaagattttctaaatccatgtatactgtcatttttgtttacctcgtctttttatcaaattataaatatagctgtattgaaaaataagctgttttgctctacacttgtactgtaatacaggtgtacggaggaaattaaaatgataagaaaacggacaataattatagtaatcactatacttctgctcttggcaggaatcctgttttacctgcaatggggacggcagatggacgtatcttcttcgtccggctctggctctgataaccattatgagctacgggtgtcggtcatactcaacgctctggtcgtgaccgatcaacagaaatgtgcggaacaaatatttgaaaaatgcagggacaattcttttcacagtgtccgtttcagttatgatattcagattccccacgcactttcagttacggtctacaagaaccagaaagacgctgaatccggcaactcggcatttcgcttttcctatcagcaggagaaccagatagacggctcatacaatattgtggacaatccagaaaaatttactctggaaatggaatgattgcacacataaggcaggacggacaggtggcgtgcgaagcgaaagccacaggtacggactagccttgctggtgtggcggtagccacgccagcatatatcaagcccctcggtatctaacagaggggcacaaatcacaaggaaacatacacaaaagttaccgattcttggctgaaatcaagcgtttggtagctttttttactgctgtgacatcggataaaaaatgtcacagttttttcgtaaagggggtatcgcactgaatgatacagagtggatacaggattttgcagacagacgtttgcagtacggtgtatcccagacgaaacttgcggtcatggctggaatcagccgtgaacatttaagccgtatcgaatccggcaaggtggcggtcacagaagaaatgaaagtgaaacttttggaagctctggaaaaattcaatccagaagcaccgcttaccatgctgtttgattatgtgaggatacggtttccgacactggatattggacacatcatcaaagatattttacagctcaatattcagtacatgatacatgaggacttcgggcattacagttatacagaacactactacatcggagatattttcgtatatacttctcccgatgaagaaaaaggtgtcctgctggaactgaaaggaaaaggctgtcgccagtttgaaagttatctgctggcacaggaacggagctggtatgattttcttatggacgctctggtggacggtggtgtgatgaaacgccttgaccttgccgtcaatgaccatacgggaatgttagatattccagaactgaccgaaaaatgccggaatgaggaatgtgtatcggtgttccgttcctttaagtcctatgcttccggcgaactggtcaagcatgaggaacaggacaaggctggtatggggtatacgctttatatcggttcactgaaaagtgaggtgtacttctgtgtctatgaaaaaagctatgagcagtacatcaaacttgggattcccattgaggaagcacccataaaaaacagatttgaaatacggttgaaaaatgaacgtgcttattatgctgtccgtgacctgctgacttactatgacgctgaacggacggcattttctattatcaaccgttatgtacgctttgtggataaggaagcagacaagaaacggagcgactggaaattatctgtccgctgggcgtggttcatcggggaaaacagagagccgttaaagctcacgaccaaacccgaaccctacacactggacagaactctacgctggattcaacggcaggttgacccgacacttaaaatgctggaaacaatcacagcaaaaacaggcgttgattatctgaaagaaatccgtaaatccacaaaactgacggaaaagcactacaagataatcgaacaacagaccacatctaccgaagatgtgattttagaaaaggagaattgaaaaatgcaacgattattatttgacttcctgctcttctctttaggtggaacagttggcgtgattgccatgtgtattttacaggctggcagacagtctgacagaaaaatgatggaactgaaaggagaaaagaaataatgaattttggacagaacctttataactggtttttaagcaacgcacagagccttgtactgatggcgattgttgttatcggtatctacttgggatttaagcgtgagttttccaaactcatcggattcttggtagttgccttaatagccgttggtcttgtattcaatgcatccggcgtaaaagacgtattgttacagttattcaataagattattggagcgtaaaattaagaatcccacattttgaacacaaacttgtggtaatatactaatatcattaaaatgtttaaaggagattcttattatggttagatacagtattgaaatcggacagaaagaacaagatattttaaaagaaatcgttttagccagtgataaaaatgtaaagaaacgtaaatttgcaacagggttatcgtctgtgatggctgtcataatgttaatatacacgattctttgctttatgaatagtcgtattggctatggtattattggattattattttcagttttctttatctggattatcataaacggagctaacacatttcagaaaaaagtaataaatattgttcattcaaagatggataataaactgacttcgggaaaacgtgaatattgttttgataccgatggagttgcagttagttctgatattggtaacgggactaatcattggaacgcctttaaatgttgggggattttcagaaattacatatatatcagaacaataaaaaatgaaatggttcttgttaatcaaaatgatttgtctgaaaatgatgtaaaagagttaaaatcccttttgagtcagaatttaaaagaagaaacgctttaatattgttttagagttaagcagtctttcagttatgatcgactgcttttttcatactcaaaattagaagaaaggactgaattacgatggaagaatgtagcgtattgattgaaacgaccaaatcagcagaggataaaacctctcgctggtttgatttacccattgattatgagctgttccgtgacctgctcggtgtggaagctgacagcaaagactatcaaatcacagatatgaagctcccctttgctggcgatattgtaaggacaacttctgtcagacgattaaacaagctatactttgcttacacggatttatcgccagaagttcagcaggcatacaaagagttgattccttattgtggcggtgtagaggatttattgcagaaatcagaagaatttctgttttatccagagtgtcacaacatcatggacgttgcccgctaccgcttggagcataacattgaattttctgctctctccgaaaagggaaagaaatattttaatctggaagcctacgcccatgaactggaagaaaaaggacgttatgctctctgcaacaatggtatgttcaaactttgacaggtggcattgcttatggcagaaatgaaagtatttgttatcaatcttgatgaacaggaaaaagatacaggctgtgcatggtttacacttccctgcaacatagaagcattaaaacaatccattggcttaccgccggacagtgaccgttatcttatcagtgattatgatttcccttttgaaatcctgcaagatacagaccttgacctgttaaacaatatctgccttgcgatttcggagagtgaaatcccacccgaagatatacctgcaattcaaagagaatggttttcaaacctgcaagagctggaagccggactttgcaatattacataccatcggaactgttcagatatggaagaaacatcagaacatttcctgtgtgtgcatggcagattttatgaatacaatgagtgaaaggaagtgaccgcttatgattgatgatatgcaagtctatatagccaatcttggcaagtacaatgagggagaactggtcggggactggttctcttttccattggacgaagaagtgattgcagaacgtatcggcttaaatgctgagtacgaagaatacgcaatccatgatacggacaacttcccgatggagattagcgaatacatttccatcgaagaactgaaccgtatctatgagcagttggaagaattaccggattacctgctggacgacttggacagttttatatcctgctatggaagtctggaagaactggtggaacataaggacgacatcattctgtattccggctgtgaaacgatgaccgatttagcctactatctgattgatgaagaacaggtactcggagaaatcccgtcctctttacagaactatatcgactatgaagcctacgggcgtgacctcgatatagaggggacatttattgcaacaaacgctggtatctgtgaggtactgcgttaagggctggcagatcagcaccgccactggtgctactgtcagctttttcttggggacagtctaggaaatccggctgtccctgttgttaggaaaatgaagaaaggagcatttacaagtgaagaaaatccgaagttatacaagtatctggaacgtggaaaaggtactgtatgccatcaatgatgtaaacctgccattccccgtgacctttacccagattacatggtttgtactgacggaatttatcatcattctgtttgcagatgtaccgccactttccatgattgagggagcatttttaaaatatttcgggattcccgttgctcttacatggtttatgtcacagaaaacctttgacgggaaaaagccatacagttacatcaagacaatggttctgtatgccctgcgtcccaaagtgacttatgccggaaaagccgtgaacctgcataagcagaaatttgaggaaactatcacggcagtaaggagtgtgacctatgttcccgattaaatatatcgacaataaccttgtctggaataaggacaatgaggtgttcgcctactatgagctgataccgtacaattattcattcttatccccagaacagaaataccttgtgcatgacagcttccgtcagcttatcgcacagtcccgtgagggaaagattcatgcgttgcagattgcaactgaaagttcaatccgaagcatacaggaacagtcaaagaagctggtcactggaaagctccgtgaggtagcaatccaaaagatagacgaccagaccgaagcccttgtatccatgataggcgacaatcaagtagattaccgtttctttctgggattcaagctcatggtcacagaggacgaagtcaatctgaagaacatcaaaaaatcggtatttctgacattccgtgagtttttgaatgaggtaaggcatacgctgatgaacgactttgtttctatgagcaatgatgaaatcaaccgttatatgaagatggagaaattactggaaaacaaaatctcccgtaggttcaaaatccgccgactggaagccaaagactttgcgtatctgatggaacacctctacggcagggacgggatagcctatgaagattatgagtatcctcttccaaaaagaaaattaaaaagagaaacactgattaagtattatgaccttatccgtcctacccgttgcgtggtggaagaaagccagcgatatttgcgtctggaacatgaggacagtgaaagctatgtgtcctactttacggtcaatgccattgtcggagaactggacttcccatcatcggaaatcttttatttccagcaacagcagttcacattccctgtggatacgtccatgaatgttgagattgtcggaaataagaaagccttaaccactgtccgtaataagaaaaaggaattaaaggacttggacaatcacgcctatcaagccggaaatgaaacaagttcaaatgtggtggaagccttagacagtgtcgatgaactggaaacagatttagaccagagcaaggaaagtatgtacaagttaagttacgtcatacgggtatctgcacccgatcttgacgaactgaaacgccgttgtgatgaagtcaaggacttttacgatgatttgaatgtgaagctggttcgccctgccggagatatgatgggactgcatggagagtttcttccagccagcaaacgttatatcaatgattatatccagtatgtgaaatccgactttttagccggacttggtttcggtgctacccagatgttgggagaaaatacaggaatctatatcggatattccgtggatacgggaagaaatgtctacctgcaaccgtcccttgccagtcaaggggtaaaaggtacggtcacaaatgcgttggcttctgcttttgtcggttcgcttggtggtggaaaatcattctgtaataacctgctagtgtattattccgtcctgttcggtggacaggcagttatcctagacccgaaaagtgagcgtgggaactggaaagaaacactgccggagattgcagaggaaatcaacattgtaaacattaccagtgattccagcaatcaagggctgttagacccgtatgtgattatgaaagatgtcaaggacgctgaaagtcttgccattgatattctgacgttccttacaggtatcagcagtcgtgatggcgaaaagtttcctgtccttagaaaagctgtccgcacggtatcccagaatcagaaccacgggctgttgcaggtcattgaggaactgcggaaagaggataccgccgtatcccgtaacattgcagaccatatcgaaagttttactgactatgattttgcacagctcctgttctcggacggttcggtggacaatgcaatcagtctggataaccagctcaacatcatacaggttgcagatttggttctgccggataaggataccacctttgaggaatacacgaccattgagctgttgtcggtatccatcttaattgttatcagtacctttgcccttgactttattcacagtgaccgaagtatttttaaaattgtagacttggacgaagcatgggcgttcttaaatgtggcacaaggagaaacactctcaaacaagctggtgcgtgctggtagagccatgaacgccggagtttatttcgtgacacaatcctctggggacgtatcgaaagaaagtctgaaaaataacatcggtttaaagtttgcgttccgctccacagataccaatgaaatcaaacagaccttagagtttttcggactggacagtgaggacgaaaacaaccagaaacggttgagggatttggagaatggacaatgcttaatgcaggatttatacgggcgtgtcggcgtggtacagatacaccctgtttttgtagaactgctccatgcctttgataccagaccgccgataaaaagtgaggtggatttggaatgatgaaatctgtcacaaaagaaaaggtattccatgtactgaaactggttctgctttccgtgaccgtcacactggtactgctgtccctgcttgggacggtagctcatgcgtctggactggtcgatgatacggtcaatgcagacaacctatattcaaagtatccgctttccaactatcagcttgatttctatgtggacaatagctggtcatggcttccgtggaactggctggacggcattgggaaatcggtgcagtacgggctttactgtatcacaaattttgtctggacaatcagcctgtatcttagcaatgccacaggatatgtggtgcaacaggcgtataagctggactttatcaatgatatggcagacagtatcgggaaaagtatccagacacttgccggagtgaccgaaaacggattttccagcagtggattctatgtgggattcctgcttattattattctgactgtaggtgtttataccgcctatacagggcttctcaaacgggaaacaagtaaggcacttcacgctgttatcaactttgtggtggtgttcattgtgtctgcgtcctttattgcttatgctcccaactatatccagaaaatcaatgatttcagttcggacatcagcaccgcttctctggacttggggacaaaaatcatgctccacgattcacaaagcaaagggaaagacagcgtagaccttatccgtgacagcctgttttcgatacaggtagaaaaaccgtggctgttattacagttcgggaacagtgataccgaagaaatcggggctgaccgtgtggaagctctggtatctgccagcccatcagatgaagatggggaaacaagggaaaatgtcgtcaaaacagagattgaggataacgacaatgacaaccttaccattccacaggtcgtcaaccgtcttggcatggtgttcttcctgctcattttcaatctcggtatcacaatatttatcttcctgcttaccggcatgatgttattttcccagatactatttatcatatatgccatgtttttgcctgtcagcttcttactgtccatgataccgacctatgagaacatggcgaaacaggcagttgtccgtgttttcaatgccattatgacaagagccggaatcacgctgattgtgaccgtagcattttcgatttccagtatgttctacaacatttccacggactatccgttcttcatggtggcgtttttgcagataatctgctttgccggaatctatatgaagctcggagaactaatgagtatgttcagcctgaatgccaatgacagccagcagataggtcgccggatattccgtagaccgatggtgttcatgcgacacagggcaagacgtatggaacgccgacttgcaagggctgtgggtacaggaagtatggtcggagctggtgctggtgcagtcgctggttctgcttataatcactctcgttctacacataaaaatacgccagccagaccacaaaggaataatgatatttccgtgggaagccgtgtcggttctgcggtaggtgctgtaatggatacaaaaaataaagtccgtgacagtgcttcttctctgaaagaaaatgtgaaagacttaccgacacaggctggttatgctgtccactctgcaaaacagaaagcaaaggataatgtatcagactttaagcgtggcgttgtggaagaacgggaaaaccgacaggaacagcgtacacagaaacgcaacctgcacagggaaaatatctcacagaaaaagcaggaattacagaaagcacaggaagcaagacagaccgttcatacgaatggatcagcgacagtcggagctaccagaagccatgaacgccctgttgccacgcctgttccaaaaccagcacagaccgatacggtcataaagccggatatgaagcgtcctgctacttctcctgtgataaaaaatgcagaagtcaaggctggaaaagaaactgtccgaaccaacatcagacaggaacagcaggtcaaatctgttgccagaacgaaccagccgaatatagcggaaactatcagtaatcgaaagaaaacaaccgtacagaaacaggtcaaccaaaaacagaatcgtaagactgttacgaagcaaccagagaaaggacggaagaaatgagattaaagcgtatccttatcataggtacgatatttccagtccttttctccctcgtcctctttttcgggatactgatttccggcgaagatgacgatagttccaacagctattcgcctgtctattctggcatgaacctgtcagccgatgtcctcaaacatcagccgatggtggaaaaatacgccagagaaaacggtatctcggagtatgtgaacgtcctgcttgccatcatacaggtagaaagtggcggtacggctaccgatgtcatgcagtccagtgaaagtctgggactaccgccaaactcactaagtacagaagaatccattaagcaggggtgtaaatattttgcgtccctgctttcttcctgtaaatccaaaggcatgacggacattaacgtggtcattcaatcttataactatggcggtggctatgcagactatgtggcgaagaatgggaaaaaacacagcttcaaccttgcggagaatttcgcaaagaataaatccggcggtgcaaaagtaacttatacgaacccgatagcggtcagtaaaaatggtggctggcgttataactacggaaatatgttctatgtggagctggtcaaccaatatctgaccgtgaagcagttcagcaacgaaacggtacagacggttatgaatgaagcattgaagtatcaaggctggaaatatgtctatggtggcagtaacccgaacacctcttttgactgttctggtcttacgcagtggtgctacggaaaagcaggaatcagcctgccacgaactgcacaggcacagtatgacgcaacccagcatatccccttgtcacaggcacaggctggcgatttggtctttttccattccacctacaataccagtgattatgttacccatgtaggaatctatgtaggaaacaatcagatgtatcatgccggaaatccaatcggctataccgatttgacctctgcctactggaaacagcacatcatttgtgccggaagaatcaaacaatagaaaggacttgaaatatgtttaagaagaaagaaaaaacagagaaagcacctaagaataagaaagtgcgtaccatgaaagtcgggacacataaaaaatctgtcctgttgttgtgggcggtgcttttagcaagcaccagctttggtgtgtataagaactttaccgccattgacacccacacggtacatgaaaaagaaatcattcagctaagattgaacgataccaacggtattgaaaatttcgtcaagaactttgcgaaagcctactactcatgggataccagcaaggaagccattgaagcaagaacaacggaaatcagtaaataccttaccaaagaattacaggacttgaacgctgataccatcagaacagacataccaaccagtgttacggttacaaatgtgctggtctggaatgtggaacagtctggaatggacgattttaccgttgcctacgaagtagatcagcaggtaaaagagggagaacagacacaggcagtcacagaaaactacaccgtgaccgttcatgtggataaggacggtgcaatggtcattacccagaatcctacccttgctccggcagtgcagaaatcaaagtatgaaccgaaagcacaggaaaccgatgtcagtgtcagctccgatacagtcaaagacgctaccgctttcttggaaacattctttaagctctatccgacagctacggaaaaagaacttgcctattatgtcaaagacggtgtgcttgctcctgtatccggcgactatgtattttcggaactggtaaatcctgtctttaccaaagatggcgataacctcaaggtcagtgtgtctgtgaaatatctggataacaaatcgaaaatgacgcaaatttcgcagtatgagcttgtgcttcataaggacgataactggaagattgtagaataaatattacagcagaatagtatggaaagttattatttaatctatactattctgcaatctattataatatcttaaggcaatttctaaagcgataaatatgtagaaaaatgcataagtactgtgtataatgaagaaaaagacaaatcgtaagttataaaggagaaacactatgggattatttggtaaaagcaaaaaagagcgagaaaaagagtacatgaacagattagatgttccattatgtttaaaagaagactttgaattgattattgatgatgtatttacaattatgggggttggaacagttgtcacaggaaacatatcaacaggaatgtgtagagaaggagaaaatgcgtgtgtttataaaacaaatggaggtgtattagagactataattactaacatcgatatacatacaaaagaacgaaaatcaaatggttgtggatataaaacagaacatgttggacttgggttaagaggagtttctaaggaacaattagaaaaaggagatagagtgattgtaaagaatgccaatatgtatggaatgtaattacaaattcatgtttgcagaatcaagaaaactggaatttgaggtgatgaaactatgacagaaatacaaattgcatggttagaattgatgacagttggaggtcttggtgtaatattggttttactaggagttactttcaatatcattgtaaaaagacagaatcaattgtgtacaaagcagacagacggtattgttaaacaatatgggtttccgggaaatggaagggtgtatccaatcgtggagtactttgtgaatggaacttgttataaaacaaagaaaaaatttcgtggaattaaaacaacgcaaatatctggagtacccgtaccggtgaaatcagaagtctatgaagatgaaaaaggctggctacatgtaaaaactggatccattgcaaatttgcgtcaacttgcagagcagttgtggcctatcaacagtaagatgacagtttattataatccaaacaatcctaaaaagtgctatgttgatagaccaatttcaaaaagttttacttccatgatgtttatcataatgggaatagtaacgatactcttgagtgtattggtattctttttgatgcagctataaattacaaaagataattggtaatcagacaaaattcaagtttgtagaattgtaaaggaataatattattttaaatgagctgttcggattaaatgcgttgccctctaacgggtcaaggatgaaccatgatacaatcaaacttgagtatggtattaaacatcaaaatattcgtaatttccttttagttaagaaacaaatatagtaagagcaaaatatcggtcttttttcattcaaaaataagttatactagaaacagaggtgatatccatgatcaacaataaagagaaaaaaatgattcaaagatattgtatatatccaaagattgcagtggttgcactcatcttttcatttgtacaatgtgcattaatagtaccattagagatgatagatgatttagtattccaaaacaaaggttttcagcctacagggatgtttactgcattaggatttgtcattatatatgttattatattctgtttctgtgcacttgcccctaagtttggaatgaacggtaagaaatggaaatctcttataggtagattaaatgtgaaacagtcagaaacagattattctaaagaggtatctgctgctttggcgtcacaagctgttggtcgattccttaaagaaagtgataatgatactgcaaagaatataggaagtgctatgcaggtggctggtgcagtaagtacagtctctacatctatagatatgttatctgaagcaggaagtaatgccgagaacatggcacatgcttatagaatccctattcctgatataaaaaaacaactcattgcctttgcagttatcccaatacttattgtagtcggtacttatatacctcaatatataaaaggaaagcaggcaatggatcaaagaattgcagcttctgcaaaacaagtagaaatagtaaaaaaggcattagaacctgtatgtgtaagagtacatgcagacaatccaaatgaatcacgtcgtagtagatcaagttatactgttatgggatatttaagagattcaggtgctactgattgttatgttcatgttcaagtcaataatagtggtactatcatcaatatctcatatgtagaaggtgtggatattaataagagtttagaagagaatttaatgcagacagaaaaagattttgcgacattacaaaagtcttttgagaatttaaatgtatccgtatctaatcctgagatattatcttatcaggctattccacaacaatttaaagatgaatttctaaatgggacattttataagagtttccgtttctatgatcaggatgcgcctatcagtttgtcttgttcatttgatacagagacagaagatcagtttgatgaatatacaagacctaaaattgatttcttcttaggatcaaaatagacaccttatgaataataaatttgatgaacaaaatgatacagtcaaattccagcttgtagagctgaacaaccaaagtttgaaaggaaaatgtataatgaccaaagaacaaataattgaagaactaaaaaaatcagcaaagccttatgaagagtattatcttgatgatgaaatattaagtgctatgctttcatatcaaaatccttatgaatttgtagagccaattttagaaattatatccactaatccctcagttgattttggaatgcccggtgatttagttcattttgtagaaaagttctataaaaagggatatgaagaattgttaatcgattccgtcaaaaaaaatccaacttcacataacattttaatgcttcaccgttgctataatgatataaaaaatccaaaccgtaatgaatttgcaaaagttgttaaagcactaaagaatgacaaatcagtctccatcgaaatcaaggatatcattgatgagtatgattgggattaaatttcttcagaaaggttgtggttagatgttgggtatcaaaaaacgtgatacaaaacaagtatttaaagcgatcgcacatcaacagggtgtttccgtgtcagaagtaaaagaacgtattcagtcaactattgatgaaatgtattacagcgatgacccagatgtgcaagctgaattttcaagttattttggaaagaaacgtcctacaccagaagaatacgtttatacgatggcaacaaaaattaaatactgatttatgaaaaatcatcacttctttaacctgtacattaaatgtgcaggtctttttttgtcgttttttatcgaatcgaacaatttttgcctttctcgtcggctatatagtgagggcaaatataaattttatctaaaatagcgattatttttttcaaatcacttagcaactgccctgtttttttcttatatggagtggaaagagggatagatacaaaacagcacagggaggaggtgagaacgtgaaaccatctgacttccagaaaactgtaatgtgtcgttttgatagttgtttaaaaaaaactgttttcggagttgtaaaggattactacaaagagttgaaaaagaatcaagcagaagctatccccttttgtgagcttcccgacattatcatagataaagttgctatatgggatacatataaaacggattacacgactttcaatatatgtggacatgacatttatgtatatgacgatgagctggcaaaagtcattaaacaattatctgaccgttaccgtgaaaatgtacttatgtactatttcttggatatgagtgatacggaaattgcaaaattgcagaatatatcccgaagtggtgtatttcaaaaccgacactatgcattaaaacaaatgaaaaagtcattagaggaggaaaattagtatttgaaacaaaaacgttcgtataagaagccatcattttatgtgatttcatcggctatggacggcgacaaaatttccattgataaaatcttagatttctatgacccgtatatatcaaaaagctgtattcgcccattatatgatgaatacggaaatgtatatatcgctgtggatatggaattaaaaggtcgtatcagagaagccattatgaaaatgatattggaatttgacataaaaattgaataggtaatatctgcggaacgcttcatataagcacttccctctttcctgttccgcttacttcttagcttgtcattctgtatcagtctatttaacaaaacagattgatacaggctgacaagagcctaatagttctttgacaactgaataatgcagacagatacgtttgtgcttgcagtgagccatcagagattgtacgccgtgacttttccaatcgggagatagcgattcatgcaatgatctgggagcgaccgttggaaaagtcgttctgccatgacctgcaacacaggataatgatacacccgtatgacacggttcagcccacaggaatgggaatggttgagataccagtggagcttgccaaagccatttgtctgcatataaaaagtattagcaaaagtgttagcaacggcaaaaaacatatccgcaagagttattgatatgctataatgaccttgttaaacgtatgtattttgctgttatcacacggaaaggagttattattactcgtgataagtgatacatcaaatacagaaactcctaaaaaggagaaaaagacatatacagtagaggaaattgcagaacaattatgtgtgagtaaaaaagtggcttacgcattggttaaaagtggacagttcgcttatgttcgtgctggtagagccatacgggtatctaaagattctttcgataaatggttaaatcaaaattaactgttaaggagagaatatattatggcttcaatcaaaaaaagaaaatcaacattttccgttatttactggtatttagacaatgcaggagaacgtaaacagaaatgggatacgttagagacaaagaaagaagcaaagcagagaaaagcatttgttgagtattatcaagaaaaatatggttatgtgattgttcccttagaggaacagtttgcacgccaaattgatgaatcgaaaaaagaacttgatagtaccgatgaagatattacgctttgtgactttttaaaaatatttgtcaatctctatggtacgtcaaaatggtcgcctagtacatttagtagtaaggtcggtactatcgaaaattacatcaatccacttatcggggattggaagttaaatgagattaccacaaagaaattatctgcctactacaacgatttattgagtgttccagaagtacccagagctaacagaaaagctactggacgttgcgtacaacctgccaatatcaagaaaatacacgacattatacgctgtgcattaaatcaagcaatccgttgggaatatattgataccaacaagcgtaaccctgcttcattagcaacgcttcctaaagttcctaaggtaaaaagaaaagtatggagtgtagatacattccgtgaagcaattcagcagtcagacgacgatttattaaccatctgtatgcatttggcgttttcctgctcaatgcgtattggagaaattacaggtcttacatgggaagatgtcgttattgatgaacaatccattgcaacgaataacgcaagggtaatcatcaataaagagctttccagagtaaatgcacaagctatgcagaaattaaaggaaaaagatattatcaagatttttccgacacagaaaccgcattgcacaacaaggcttgtattaaaaacaccaaagacagaaacaagtaatcgtaccgtatggttgccaaagacggttgcagaattactggtgcaatatcaaaaagatcaaaaggaattacaggaatttctaggagacgcttataacaattacaaccttgttatagctttggaaaatggaaatcccgttgagagtagaattgtgagagacagatttcaaaagttatgcgaacaaaatggctatgaacaagttgttttccacagtctgcgtcatttatccacaggatacaaattgaaaatgaccaacggcgatgtaaaatcagtacaaggcgatacaggtcatgcagaagcagaaatggttacagacgtttattcagaaatcatagatgaagatagacgttacaatgctcaaaagatggacgaacaattttattccactctaaaccatgattcagaaatgcaaccacaaaatgaggaagttcagccagaaaacaacggcttatcagacagtgatatggagcttttacagcttttaaaatcacttacgccagagatgaaagcaatgcttttgaaacaatcagcttcaaagtaatttttcaaaagtgttagcaaatcttcaaaaatctgctgatattttttcaaaataaaaaaagtgttagcaaactcttctactcaaacagtcataaaaatatcgaattacaaattctgaaaatcaaaagaaattgcaaaatataaattgaatatgttcttatccgacaggttataagccaaaaacaaaagaagctgaaaacctcgataaatcaaggctttcagcgttgtttgctggcgtcccagacaggaatcgaacctgcgacgtttcgcttaggaggcgaaccctctatcctactgaggtactgagacgtatttaattgtaatggagcaattttcaaatttatttcataaatcgcttccgaaaggggattgctccacctgacccttaggaggcgagtgctctatccagctgagctatgacgacacatgccgcaaacccttgattttactgggtttctgggatttttcccttcggccatatataagattatcaactctatttcgagttgtcaatctacagattttttcgatttggtaacattggaacgttccccaatttggggaatgctttgttgtcaccattagcatttttcagaatagattcgaactgaaagttgtttttcattttttccctttggggaatgcctcggctttctcttaggaggagcttgttatatccatttaactaagggagcctgactaactcgtactttattattttacctattaatcctgtaaaagtcaatacagggatggttttccccctccctgtatctttcaaaaatatttatccacatttttctttatttatccacatacaaagggtctgccatcggaagcttcttccgaatgcatggcggattaaaagttgattcttccctgcagccacacatttcctttgaatctgcgtccgactgccggttcgcccatgacctctctttttggtacacatacatcgaacagaagaccgttcacatccagtttcatgatgcagatatcttctctcgttatctcatttctggtaagacgatattccaggatttctcccatgatcgaataccggtcacattcgattccgtacggcatgatgtacgtatccacgatcgtaaatacatcttccgatatcaatcttcttgatactttggaatatgtatcgatgtcatccagagtaagactttctatcgcctgtggatcgccagattttgctgcgcttaacagcagcatacgattgtgtacatcttcctgctgttcccgctcctgttctttacttttcagcaccggaagcagaatggttccctcattgcaaagaccggacaatgtcacggaagaatacttgatacttcttccaccaagctgcctttccctcagatattccatcatattctgaagataaaataccagattaatgcctacttttgtatcttcacagatgcccacatatgcttcccggtctatccttcgttccacactgacatccgcataggatgtcacaccggatcctttgaaatatggtgtataataacggtactcaaactgttcatcgatgtccatatctccgcacaccttgatcccgattccttctccatattctttttcaaactcacaaagatccgttgtttcatcctgtgtaacgagctgatgttgtgtataggattcttccacatcttttaaaatctgtgttaactgttttttgtctctgatatttccaaatccaatggatttcatatattgatgcatacgcttatccttataattgcttattttttaggtacaagcttctctgttccacccatgtatggctgtaatgccttagggatcttaactgatccgtcttcctgaaggttgttttccaggaatgcgatcaacattctcggtggagctactactgtattgttcagtgtgtgtgcgaagtattttgttccgtcttcacctttgacacggataccaagtcttcttgcctgtgcgtcaccaaggttagagcagcttcctacttcgaagtatttcttctgtcttggagaccatgcttctacgtcacaagattttaccttcagatctgccaggtcacctgagcagcactctaatgtacgtaccggaatatccagtgagcggaacagatctactgtgttctgccataatttatcataccagatcttgctttcttccggtttacatacaacgatcatttcctgtttctcgaactggtggattctgtatactccacgctcctcaataccgtgagctcctttttccttacggaaacatggtgaatagcttgtaagtgtctgtggaagctgtttttcttctaacattgtgtcgatgaatttaccaatcatagagtgctcacttgttccgatcaggtacaggtcttctccttcgatcttatacatcatggaatccatctctgcgaaactcataacacctgttacaacattgcttctgatcatgaaaggtggtacacagtaagtaaatccacggttgatcataaagtctcttgcatatgcaagtacagaagaatgaattcttgcgatatcacccatcagataatagaatccatttcccgctactcttccggcgctctcaagatcgattccgtcgaatgcttccatgatctctgtatggtatggaatctcgaaatcaggaacaaaaggctccccgaatttttcaatttctacattctgactgtcatcttttccgattggtacagaaggatcgatgatgttcggaatgatcatcatattctgtttcagtttctcttctacttctttttcttctttggaaagttcttcgatccttgcagcactctcagctacttttctctttaattcttccgcttcttctttctttccctgtgccatacatgcaccgatctgtttagagattttgttcttttctgcacggagtgcttctacttctcccttaatatctctattcttctgatccagttctattacctcatctactaaaggtaatttctcatcctgaaatttgttcttaatgttctgctttacaacatccggattatttcttacaaatttgatatctaacatttttctaaattcctcctgattatatatatgttatattatctctcatttcttgttttttcaggtcttgccatatctggacgcacattactggttcttgcatttaagatcttaccattgtttgcttttccagatgtctgttttgtatttctcgcattcgtgcttttctgatttccattctttgccggaccagacttaacagacttaagacttcctgttgcagatgcaactgctttatccacctcttcttcataaccatcttcgaagattgctttatccagtgcttctgcttcttcctctgcaagctctacataactttcaccttttacgatctctttcacataagtatagcagccttctctgctgtgcatcgcattgatgatccaaccagtattattattgtccagcattgcaagtgcgaaactgagtttaccacccatttcattaaatgcatcatactttacaattccaagtttctggtaagatttttccatcttcttgttaagtttctgaatgtctgtacgattctgttttgtatatttcagaatggcctctacatccgagaatcccgacatcatactttcttccagagtttttccatctttaccacgcataaacgtcgtatagctgcttttcaatcgattatacttcattgttacatttacatacagaacgaataatataacaatcagtatcagcaaaaatataaatattaatgccggatcgataccaagtgctttcagtattttgctatccatattcaattactctcctcttttaatgctcatcatcatatcgaacagatgttctaattcgtcatctgaataatattctatctctatcttaccttttccctttccttttgatgctatacttacctttgttccaaatacactcttcattttttcttccagatcctggtaaataaatgaattggccaccggtttcttttcttttggtttctttggattttttatctctttgaccaatttctcagtttctcttacactgagtttttcgtcaaatatcttatttgccagtgtgtactgaagctcaggatcgtcaatggccagcaatgctcttgcatgtcccgttgaaatcatatcgtcaatgatcatctgttgaactttatcactaagtttcagcaaacgcatagagttcgttacggctgttctgctcttcgatactctctctgcgacttcatcttgtttcagattgaattcctccagaagtctcttgtatgcaattgcttcttcaatcggattcaagttttctctctgaatgttctcaatcaaacctatctcaagaatttcctgatctgtatattccttttcaatcacaggaacctcttttactccggcaagttttgcagctctccatcttctttcgcccgcaatgatctcatagtaatcttttctttttcgaacaagcaatggctgtaacacaccaaattgcttaatcgaatccgaaagttcaaggagagcatcttcatcaaaattctttctcggctggtctctgtttggctcaacctcattaattttcattacctgtacaccggatttagctgctgcatcttcttttgattccacagttttttccgatgtaacagacttcatgctcttattatcaggaatcagactgtccagtcctttccccaatccttttttctttattggcattcgtttcctcctacattacatctttcatttactctctattcataacttcatccgccagtctctgatatgcgcttgctcctgtagactttggatcatacagattaatcggcataccataacttggtgcttcagccaatcggatatttctaggaataatcgtcttatagatgttctgttgcaggttttcctttacattttccactacctggagtgaaagattggttcgtgcatcatacatagtaaatacaactccttcaatctccagaacaggattcagcctttcttttacaagctccactgtatgtattaactggctcaacccttcaagtgcgtaatactcacactgaatcggaaccagtacagaatctgctgttgtcattgcattgattgtcagcatacttaacgatggcggacaatcaataatgatataatcataatcatctttgatcggctgaaccgcatttcttataataaattctttatcatccacaccgatcagttcaatttcagcagccgagaggtcaatgcttgtcggtatcacatccagattttcaattgcttccttttgcagaacttcatctacaccagcctgaccaatcataagatcatagatattcttttcaacttcatctttgtctattcctaatccactcgtcatattgccctgcggatccatatcaatagcaagaaccttttgtcctttttcagcaagacatgccgacagattaatagctgtcgttgtttttccaacgccacctttttggttcgcaacggctataactcgtcccatttaattatcaccttcccttatttcacatgattctagtatatcacttttcagaatacttatccagaaaatgtttcacgtgaaacatagattttcccttttccataaatataaaactgttctatatattattttcgttatctttgtgtgacatacgatttttgtgaatgtttcacgtgaaacatttgtttttaccacttgctttattattcgtgtcccttcttttcatatattccaagtaaaatgtcctatttccttcactttgttcattttatgctcattttgtaaaggcaatcttccaattcataagtaaatatagtataattaggaaaagaaagtgaggtatcagcatgaactggaaaaagacattattattcatctcaacagcaattggaacgacaaccttagcattccatgtaataaataaattcatattcaacgcctccgatgaacattcagaagaagatgaatccaattactataattggaaatttggaaatatatattataaaaaagaaggaactggttctccggttcttcttattcatgatctgaatcattacagttcttctatggaatgggataaagtaatcggtactctttccaaagaacacacagtatatacgatagaccttctcggatgcggcaaatccgacaagcccgcaattacatatacctgctatctgtatgttcaactgcttactgattttattcgtgatattataggcgaaaagacagatatcgtagctaccggggcttcagcctcctttgtaacagctgcctgtcagaatatagccgaccagattgaccatattattctggtttgtccggaaagcacacatgcacttgcaaaagctccaaatcacaaatcaaaactacttgcaaagataataaatatccctatatacggaacatttatttataatgtaggcgcacgcaacaccgctctttccgactcagcagagtgtaaatatctctacgccagcattttaggacattacacaactgtaaatgttgcccactgtctcgaaggacttacaacctcaattgcagtaatcacaggtaaaaacgcaccagaaacatcacaaaaaaccaccgaatactgccacatacttccatctatcgaacacctcgaagtcccaggcagcggattacttccacaacgcgaaaatgtcaatgcattcttggagcaactagacctactattaagtgacaactgctaattcaaggatttgcactaatatagtataagccaattactatttcaaagactatcattaacattcataaacaaacgcagttattattatacattccatccatcagcaacctacacacacgtacaaagggaggatgtttcacgtgaaacatcctcccttttaccaatttttcccctgcttccaacacctatcctcatatccacaccacccctacgctctcattatttaatcatagccgcctgtgaaaaccaggtggaatgaaaatgagatagggattcctgtgcatatgaggtcatggttggaaattctaaagcaaataaattggccgttagtcatcaaaaatccattgtctgagcgaacgcgagttttggatttttgatggctgcttttaggccaatttatttgctttagaatttccccataaccgaatcagcacaggaatccctatctcattttcattccatcccggggtaagccatttccccaacgattaaacaatcggctcccttgaaggcatccctgcctttctcggatacttcttagccgtattcttcactttgtggatctttacaaaggatcttccgatatccgttcccggcaattcgaatttcactacatcttctatctctcctccaagcactttcaccgcttttttcgatccttttacctcttcatcaatctcacctgatttataaggtataaacataccgcctacttttacataaggaaggcaatattcactcaatgtcgccagatttgcaactgctctggatacacacagatcatacttttctctatatgctgcatctttggcataatcttctgctcttccatgaattgtgtggatatcttccagccccagctcttcaatcaccgtattgaggaacttaatccgcttattcagtgaatccagtaatgttactttcaaatgtgggaatgcaattttcagcggtaatccaggaaaaccagctcctgtacccacatcgatcactgtatccacatgattcatattcattacttttacaatcgacaagctgtctacataatgcttctctacaacttcttcatattctgtgattccggtcagattcatcaccttattccactcttcaagaagcttatgatagatatcaaactgctctttctgctcgtctgtgatctctatccctatcttttccaggctttttttcaaaatctggtccatatttttctccttttttctctctaaaattaataagtatataaaatgtatgatttttcatcttattcattttatatactcatcattatatttactgtgtaattatatttttagcgtatattaatattaatacatttatttttgtgttagatgtttttcttactgatatacttcattatattacagctactcatcccgcttttcttactttttcatcacatttattaatttatctatgatttcttatctgtgatttccgctcagatacacaagcaatactgatatatctgccggagatacaccagagatacgcgatgcctgcccgattgacaccggtctgtactctttcagcttctgaactgcctcaatacgaaggctgttcactgcatcatagtccatatcttccggaattttcttattctccatcttcttgaactgctctacctggcgtttctgacgttggatataaccgtcatatttcagagaaatatccacctgctcgatcacttctgctgccagatctttcggaagttccggtctcgtcacatcaatagccgtaacagcttcgtaagataattccggtctccttatcagttctgccagactgcttcctgaattcaaaggtgtactttcataagattccagaagttcctgtaccttttcactggttccgacataggcattctttaatctctcgatctcagactcgatcagtctttctttctctttcagacgatcataacgctcctgtgagatcaaaccgacttcatagcctttttctgtcagacgctggtccgcattatcctgtctaaggagcagacggtactctgctctcgaagtcatcattcggtacggttcatggctttcctttgtaaccagatcatcgatcagaacgccgatataagcctctgagcggtctaacactaaggattccttgccctgcagctttctggcggcatttatgcccgctataaggccctgtgcggcagcttcttcatagcccgagcttccgttgaactgaccggcactgaataagccgctgatattgcggaattccagtgatggttttaactgtctcgcatcgatacagtcatactcgatcgcatacgcattccgcacgatcttcacatgctccagtcccggaacactgcggtacattgcatactgtacatcttcaggcagcgaacttgacattccgccgatgtacatctcatctgtctccagcccttccggttccaggaatacctgatgacgttttttgtccgcaaattttaccactttatcttcgatagacggacaatatctcggtcccgtaccctcgatcatgccggaatatagcggcgatctgtccaaattggcacggatgatctcatgtgtcgtctcatttgtataagtcagccagcaggatgcctggtcgatctgcacatcgtccggattcgtggtaaatgaaaatggtaccactctttcatctccgaactgttcttccatcttgctgaaatcaactgttttccggtctactctggcaggtgttcctgtcttaaaacggtacattttaatgcccagttctttcagacagtcagtcagatgattggccgcctgcagtccgttcgggcctgtatactgactcacatcaccataaatgcatcgtgctttcaggtaagttccgctacagatgataaccgccttacagtgatatgttgcaccggaaaatgtctgcactcccgtgatctttccatcttccacaaggagattggcaacctctccctgtttgatctccagattctcctgagcctccagtacgcggcgcatcgttctgctgtacactgctttgtctgcctgtgcacggagcgaatgtaccgcaggacccttggatttatttaacatttttgactggataaatgtacggtcgatgacctttcccatctctccgccaagggcatccagctctcttaccagatgtcctttcgagcttccgccgatattcggattacacggcatcatcgcaatgctgtccacacttacggtaaataccagtgtctgaaagcccagtctcgccgtcgccagtgctgcctcacaacctgcgtggccggcaccgatgactacgacatcatatttatctttattttcccatacagaatttgctgaatatctcattaaccaaatcttctcctatcgtttcgccggtgatattaccgagagcttcatacgcatccataaggtcgatcgaatagaaatcctccggcatatccgcggcaatgctgtcattcacacgttccagtgcagcatatgcatcctgaagcgctgttttctgtctcacatttgtaatatagatttcatcattaaatgtcagttctccctggaagaacatctcctttaacgtatcttccagctcttcgattccctgtacattctttgcagagatctcgatcaccggaaattcttccggcagttcttcctgttcttttgtcacctgcatatccagatcggatttatttaacaggatgatcgcacgtttgcctttgatcagatgcaggatctctgcatcattttcatccagtggtctggatgcatcgatcacatacaggatcaggtctgccttgtccgcatattctttcgcacgatcaacaccgatcttctccaccacatcttccgtatcacggataccggcagtatccataatatttaaggaaatgcccttcagattcaggtgttcttccagtacatctcttgtcgtaccggcaatatcagtaacgattgcccggtcttctccgagaagtacatttaacagagaggattttcccgcattcggtttcccgaggatgactgtgcgtacgccctcttttataatcctaccatcatcacagctatctagcaatcttttcattgcttccatgatctcatcgacgacttttttcagtgtttctccatagccgtcaacactgatatgctccggatcgtccagtgcagtctcgataaatgcagtatgatacaggatcttttcgcgcatttcgctaatcttatctttgatatttccttttaactggcttaccgaactctgcaatgcatattcgttctgcgatgcgatcagatcaccaactgcttctgcctgcgaaagatccagtcttccgttcaggaatgcacgcttagtgtactctcccggctctgccgggcgtgcaccgtttttgatcaggacttcgagaattcgttttaccacatagacaccgccgtgacagttgatctctaccgtgtcttcaccggtatagctgtgcggcccgcgcatcagcatgaccaggacctcgtcaattacctgttctccatcaacaatatatccataatgaatggtatgtgacttctgatcacatagttttttctcttttttccccttatatacccggtctgcgatctgaaatgcttccggtccgctcattcgtacaattcctattcccgaattactcattgccgtagatattgcggcaatcgtggagttatataattgttccataatttcctccaatatacatttgagtgaaaaaaagacaggggccgcttaaagacccctgtctcttaattatcgattatttctgtttcttaccagtgttaccacaactcttctgtacggctcttcaccttcactgtgtgtggatactgccgggtcagactgcagcgcagagtgaatgattcttctctcgtatggattcattggctcaagagaaactgtctttcttgttctctttactttgcttgcaatgttctttgcaagattttccagtgtttcttttcttcttcttctgtaatcctctgtatcgagtttcactcttacatagccatcctgcatcttgttggcaacacgatttgtaagatactgcagagaatcaagtgtctgtccgcgttttccgatcaggatacccatgttgcttccttccatattgatggaaagtgctccttcttcatctacaacagatgtaacttttacatcatccatgcccattgcattcatcacatcgtaaatgaacttttcacatgtctcgatcgtctgtggttcaacttttgcaagttctacttctttctttggctcagattttacttccggtttttcttctcttacatttttctttgtatgagaatgctcttttgccggcttcttctctgtcttcttctctggttttacttcttcttttaccggtgtttcaactttactttcttccactgtctcttcaaccggtttttcttctcgttttctgcgggctttgattactgcctgctttcttccgattccaaggaaaccttcgcttcctttttcaacaacaatataatctaagcgatcacttgttacacctaactgaactaacgcttcggtgatcgcatcgtccaatgtctttgccgatacagtaatgtaatcctccatgacagcgccccctaatcattttcgttaaatttcttcaccatgtttgcttttgatgcgagacttcctttcttcgcattttcagctttcttgtgtgcgttttctaccttggcttctctttctttttcactcaggttcgatgtactctgtctcttcttctggttctgattgttcatattcttggtattcatctgagccattgctgcgatacgttcattcttctcgccacgttttacacgtttttcctcagccttttccttattctgctccagaatctcttctacagaaatcttgcttaagtgcttattgataaatacctgctgaacacaacgtactaccgcactgacgatccagtacagaccgatacctgtcggaagtgagaataccataaataccgaaaacagtggcattgtgatattcatcgtgttcattgtagacgccatcgggttatctttgtccagctgctggcctgaaatagcctgtgaaagcttgatacttccatactgtgtcaaacctgataataccggaagtaaaatcgcagtaataatgatcatgattgccgggaaaccatagcttccgctgttcttgatcatctgcataggtgagatagtcagatccggaagtgtcaggaatacatttacagcctttggagctgtcttgatctccggaacatatttctggatattatagataaccgggtacaaagcaaataacagcggcatctgaatcagtaacggaaggcatcctgctgacatcgatgtaccatatttatcgtacacctgctgaatctcttcctgctgtttcatcatggacgcctggtctttcttatttttatacttcttctgtatagcctgaatctccggattcataacagaagacatcttggatgttctctgctgcttaatcgtaagtggaagtaataatgtatacacaaaaatcgtatacagaataatcgacagacctaccagcccgctatcgcttggcagacatttgtccaggaaattatagataaagttcattaccttacccagaatccagcaaagctgtccgacaatcggccagttagcggcagtcagtaaacttggtaccataattttttcctccatatgtagttgtaatctttttaaggaacagggtcgtaacctcctctggtaaacggattacaacgcagaattctccacaccgccagtcgtcctccttttaatgcaccgtatttctcaattgcctctttcgcatactgagaacaagtcggataaaatttacaggtggaaccgccctttatcggagacagatatctctgataaaatctgataccagtgagcagaatcttcttcataatacgttacccctcatctataatcttatgaagatgacccagatggagcattgcgccgacaatatctttataatcttttcctttggcgcctattcttgctataacaattatatctaatccacatctgaatcgttcttcttgcagtctatagctttctcggattaatcttgttaatctgtgccgtactatactgtttcctacttttttgcttacagatattcctaatcgattctgacttgtcccattttccagtacatacatgaccagatatttgttggcgtaagatttcccttttctatatatatattggaaatctttgttctttttcagtgattcggaatacttcattgtcttattctcctaatttttctgagtagaagaaaaggccacatatatgcggcctacgctgataatttctttcttccttttgctcttcttgcagcaagtacttttcttccacctgctgtgctcattctagatctgaagccatgtactttagctctctgtctcttctttggctggaatgtcatcttcatggatatccacctccttattttattccaaggggcttgccccctaattttcataagacatcagccttgattatataaaaaaaaccgctctacgtcaagctattcctcaaattttaaaaatatatttatccacattttgtggaaaactttgtgggtttttgtggataacgtgtggaaatcatatatttttttagattttttccccatttcatgcgcattttacaagtgttgataattgggattgagttttccacatatttcaaatctacatcaagagaaactgccagttgccaaagcatagcgataaaagattgcctaaagcaactttttgatgtacaatgtagaagagtgggtttataggtgaaaatccgcgaatcagacagattaggagtaaatatgatgaatacagtaaaggaaaaatggcctgaaattatcgaacatctcagggtcgaacatgagttgtccaatgtatcgttcaatacgtggatccaaccattgaaagtttacgatgtcgtagacaataccgtatttatattagtaaatatgaatgcgagtgtagaatatattgaaaaaaaatatcagcttccattaaaagtatgtattgcggagattactggaactgaatatgaagttgtcttcatttccgaggatgatgacagactgaacgagattcagaatatggccattgaagcaaatcagaagaaaaaaagcaaaagtgctgcggaaaaagccgggcttaatccgaagtatacttttgatactttcgttgtcggcggtaacaataatttcgcccatgcagcttcccttgctgtagccgaatctccgggagaagtatacaatcccctcttcttatatggaggtgttggacttggaaagactcatttgatgcactcaattgcacattttattctggacaagaatccaaagaaaaaagtcctctatgtaaccagcgagacatttaccaatgagctgatcgaagctctcaaaaacggaaaaaccgccggaaacgagtccgcaatgtcgaaattccgcgataaataccgtaataatgacgtacttttgatcgatgatatccaattcattatcggaaaagaaagtacacaggaagaattcttccacacatttaaccatctgcatacatccggaaagcagatcatcatatcgtctgataagccgccgaaagatattgaaactttggaggccagacttcgtacgcgctttgagtggggtctgattgctgatatttcatcacctaattatgaaacccgtatggcgattttacagaagaagatcgagctggatcatctggaaaaatacaatattccgaatgatgtactcgaatatatcgcaacgaacgtcaagacaaatatccgagaacttgaagggtctcttaataaactgattgctctttataaactgaacaacaccggttctatcgatattgcccttgcagcagaggccttaaaagatatcatttcttcggataatcgcagagaagttacgcctgaactgattttggacatcgtttccgaacattttggtgtatctattcctgatctgaaagggaataaacgtaacgccgagatcgtatttccgcgccagattgccatgtatctgatccgaaatatgacagaaacttcattaaaagcagtcggtgtcattcttgggggcaaggatcactctaccatcaagcatgggattgagaaaatcgagaacgaattaaaggcggacgagactctttctaacactattaatattataaagaagaaaatcaatccggcttagccttattttgccattttggcctgtgaatgactatgtggaaaatctgcgtctgacatgtggataactatgggacagccttgggaaaaacccaggaattttacacctgtctttagaaacgaaaaagttttcaacagtcgttccacataaaatccagtcgaattccacaaagttttcaaagccaaaattccttgcaaacactgggctagaggcacttttcctcttttccacatcccctaatacggctgaggcggaaactattttatttatttatctatcacacacgtgcgaaaggagttatacacatatgaaaattacctgcagtaaatccaatctagtcaaaggtgtcagtattgtttccaaagcagttccttctaaaacaacaatgccaatccttgaatgtattcttattgatgcaacaacagatattatcaaattaacagcgaatgatatggaacttggtatccagacagaaatttccggagacattattgatcgcggaatgatcgctatcgatgcaaagattttttcagagatcgttagaaaacttccggataatgaagtaacgatcgaaactttagataatcttcagacagtcatcacatgtgaaaaagcaaaatttgatattgccggtaaacctggcgatgaatttgcttacttaccaattattgagaaagaagattctatagaagtctctcaattcacattgaaagaagtcatccgtcagacaattttctctatttctgacagtgaaagtaataaacttatgactggagaattgttcgacatcagtgataatattctgaaagttgtttcgctggacggacacagaatttccattcgaaaagtgccattgaaaaaaagcgtagctgacagaaagcttgttgtacctggaaagacactgatcgagatcagtaagatcctttcgggtgaggctgaaaatgtggtatcgatttcatatacaaagaatcatattgtgttcgaatttgataacacgatcgttgtatcacgtctgatcgaaggcgaatatttcagaatcgatcagatgttgtcaaatgattatgagacaaaagtcagaattaataaaaaagagctgctcaactgtatcgaccgagcaacacttctggtaaaagaaggagacaagaaaccaatcatcatcaatatcagtgacgaacttatggaattaaagatcaaatcccagatcggatccatgaatgaagagattatgatcacaaaagagggaaaagatctgctgatcggattcaatccgaaattcctgatcgatgcacttcgtgttatcgacgacgaagaagtaacaatttatctgatgaatgcgaaagcaccttgcttcatcaaagatgatggagaaagctatatctacctgatccttcctgttaactttaatgctgcagcataaacgggaatggaatatctggaagaagattaaaagataaaacaaaaacgcaggaatacttgcaaaaagatttagcgataagtataatgaaaaacaactgaaaaacagaaaaaatgtgcataaaaatacaacaaaatgcatacaacagaacgctttttgatagatggatcagatatagcctggctgatctgataaaatttatctataagttatgcttataagatatgggagaatcccgggagaggaatgcgagacatatggagacaattagattacgagatgaatatatcaagcttggacaggctttgaaagctacaggaatggtggaatccggagtagaagccaaagaagtgatccaggaaggtcttgtcatggtaaatggcgagacagatacacgccgcggacgtaagttatacggcggagatgttgtattatttgacggagaagagatcagaattgaaggttaattccctgaaattaaagaattttagaaattatgatcttctgaatgtggagtttgatggttctacgaatattttttacgggaacaatgcccaggggaagacgaatattctggaggctgtgtatctgtccggaacgaccaagtcccaccgcgggtcgaaggacagggatatgatccgtttcggcgaggatgaatcacacatcgaaaccgtggtggaaaagaacggaatcagttatcagatcgatatgcacctgaagaagaacagtccgaaagggattgccatcaataagatgccgatccggaaagcaagcgaacttttcggaattgtgaatcttgtatttttctcgccggaagatctgaacattatcaagaacgggccggcagagagaagaagattcatagatctggagctttcgcagcttgataaggtgtacctgaataatctgtcgaattacaaccggatcgtgaatcagcgaaaccatctgctgaaagagctcagtttcggcggaaagaaagatctttcggatacactggaaatatgggagctgcagatggtacaatatggggaaaggctgattgccagaagaaaagaatttgtcgaacagatcaatgggatcattgcaaagattcaccaaagactgaccggcggtaaagaaagcctgaagatcatatacgagccaagtacgggagatctgccatttgaacaggcactgaaccggtaccgggagagagatctgcggatgaagagtacaacggtggggccgcacagggacgacatcggctttctgatcggtgatatggacatccgcaaatatggttcccagggacagcagagaacggctgccctgtctttgaaactgtcggagatcgagctggtcaaactggcaacacatgacaccccgatacttttacttgacgatgtattgtctgaacttgataaacacaggcaaaactatttgttagacagcatacatgatatacagactttgatcacctgtacgggtgttgaggattttgtaaatcaccgcttttcaataaacaaagtgttccatgtccagaacgggcaggtaacgaaagaaaactaggaggactgagaatgggtacagaaaaagtacagcatgaatacggcgcagatgaaattcagatattggaaggtcttgaggcagtccgcaaacgtcctggtatgtacattggaagtacatcagccagaggcttgcatcatcttgtatacgagatcgtcgataatgccgtagacgaagctttggcgggcttctgtgatacgatttatgtaacaatcaataaagacaattcggtgaccgttatcgataatggacgtggaattccggttggtatcaaccacaaagcaggacttcctgcggtagaagttgtatttaccgtgctgcatgcaggaggtaaattcggtggtggaggatacaaggtatccggtggacttcacggtgttggagcgtctgttgtaaatgcgctttccaactggctggaagttgagatctaccacgagggtaaagtataccagcagcgttacgagcgcggaaaagttatggagaaactgaccgtgatcggtgactgtgaagaaggaaagaccggtacaaaagtaacattcctgccggatgataccatttttgagacaacgatctttgattttaatgttctgaaacagagattccgcgagatggcattcctgacaaaaggactgaaaatcgtattgaaggacgaccgtgaggaagagccgaaagaaagaacattccactacgaaggcggaatcaaagaattcgttacttacctgaaccgcagtgcgacaccgctttatgagcagatcatttactgtgaaggtatggtaaataatgtgtctgtcgaagtggctatgcagcacaacgattcttacagtgacaatacgtatggatttgtcaataacattacgactccggaaggtggaacacacgttgtcggattccgtaatgcgatcacaaagacatttaatgattatgcaagaaagaacaagcttctgcgtgacaatgagccgaacttaagcggtgaagatatccgtgagggcctgaccgcgatcatcagcgtcaagatcgaggatccacagtttgaaggccagaccaagcagaaacttggtaacagcgaggcaagaggtgcggttgacaatgtagtcagcaagcagcttgagatcttccttgagcagaatccggccgttggtaagatcatcgtagagaaatctgtgatgtcccagcgcgcgagagaggctgcaagaaaggcaagagacctgacacgtagaaaatcagcactggataatatggcacttcctggaaagcttgcagactgttcggataagaatccggagaactgcgagatctacatcgtagagggagattctgccggcggttctgcgaagacagcacgtgaccgtgcgacgcaggcaatccttccactgcgtggtaagatcctgaacgtagagaaggcaagactggataagatctacggcaatgccgagatcaaggcgatgatcactgcatttggtacaggaatccatgaagatttcgatatttccaaactgcgttatcacaagatcatcatcatgaccgatgccgacgtggacggtgcacatatcagtacactgcttctgacgttcatttaccggttcatgccggagcttatcaagcagggttatgtatatctggcacagccgccgctttataagcttgagaagaacaagaaggtatggtatgcatacagtgacgaagaactgagtaatatcatcaatgaagtcggccgtgacggtaataataagatccagcgttacaaaggtcttggagagatggatgcagaacagctctgggagacaaccatggatccggaacaccgtatcctgttacgtgtaacgatggatgatgagacaacgagcgaactggacctgacatttacgacactgatgggtgacaaagtagagccaagacgtgagttcatcgttgagaatgcaaaatacgttaagaatctggatgtataatataagcgtgtagaagaaaggaggaacagggataattaaatctctgagagattgatggaagacaatatatttgacaaagtccacgaagtggatctgaaacagacaatggaaacctcttatatcgactacgcgatgagtgttattgcgtcccgtgccctgccggatgtaagagatggtttgaaaccggtacagagaagaatcatgtactctatgatcgagctgaacaacggtcctgacaagccgcacagaaagtgtgcgcgtatcgtcggtgatacgatgggtaaatatcacccgcacggtgacagctctatctatggtgcattggttaatatggcacaggaatggtctaccagatacccgctggtagacggacatggtaactttggttctgtggacggtgacggtgctgccgccatgcgatacacagaggcaagactgagtaagatttccatggaattaacagcggatattaataaaaataccgttgatttcattccgaactttgacgagacggagaaagaacctaccgttctgccgtcaagatttccgaaccttctggtcaacggtacttccggtatcgctgtaggtatggcgacgaatatcccgccgcacaacctgcgtgaagtgatcaatgcagtcgtacagatcattgatgaccagatcgaggataaagaagagacaacgatcgaagagatcttaaagatcatcaaaggaccagacttcccgacaggtggtatgattctcggaacaagaggaattgaagaggcatacagaaccggacgcggcaagatccgtgtgcgtgcggtcacagatatcgagacgatgccgaatggcaagagccgtatcatcgtaagtgagctgccttacatggttaacaaagcaagactgatcgagaagattgcagagctggtacgtgataagaagattgacggaatcacagatttaagtgaccagtcaagccgtgaaggaatgcgtgtagtcattgagcttcgaagagatgccaatgccaatgttattctgaaccagttatacaaacatacacagcttcaggacacattcggtgtgatcatgctggctctggtcggcaatgagccgaaggtcatgaatctgatggagatgctgaactactacctgaaacatcaggaagaagtagtgacacgccgtacacagtatgagttaaataaagccgaagagcgtgcacatattttaaagggattactgatcgcattagataacatcgatgaagtgatcaagatcatcagaggttcccagacggtccagatcgcaaaatcagaattgatggagcgtttcggactgacagacgtacagtcacaggcaatcgtagacatgagactgcgtgctctgacaggtctggaaagagagaaactcgaggcagaatataaagcactgatggagcagatcgaacatttacgtgcgatccttgctgacagaaagttattacttggcgtgatcaaagaagagattcttgtgatccgtgataaatacggtgatgagagaagaacatccatcggatttgatgaatttgatatttccatggaagatctgatcccgagagaagatgtggtcattacgatgactaagcttggatatatcaagagaatgtctcatgatacattcaaggcccagaaccgtggcggtaagggaattaagggaatgcagaagctggatgaggattacgtagaagagctcttcatgaccaatacacatcattacctgatgttctttacgaacaccggacgtgtataccgtatgaaagcatacgagattccggaagcaagcagaacatccagaggaactgcgatcgtgaacctgctgcagttaatgccgggcgagaagatcagtgcggtcattccgattgagaaatataacgatgatgagtatctgctgatggcaaccaagaaaggtctcatcaagaagactccgattaaagaatatgcaaatgtcagaaagacaggacttgcagcaattactctgcgtgaggaagatgagctgatcgaggtaaaatacacagacagcgatcatgatgtgttcatggttacaaagtatggacagtgtatccgttttaacgaaagtgatgtacgtccgaccggaagaacatccatgggtgtccgtggtatgaatctggtagaccgcgacgaagtgatcggaatgcagatcgactcacagggaacagaactgctgatcgtgtccgaatatggtatgggtaaacgtacttccatcgatgaatttacagcccagaaccgtggcggtaaaggcgtgaagtgttataagatcacagagaagaccggtaacgttgtaggtgtgaaagcagtagatgaggacaatgagatcatgatcatcaacacggagggaatcatcatccgtatgaagtgtgacggaatctcagaactcggaagagtgacatccggagtgaagcttatcaacctgccggaaggcgataaagtagcttgtatcgcaaaagtacgtagaggcgatgaatcagaagatgatctggtagagccggaagaaagtacagaagatgcagagaacgtagagacagaagaataaagatataaaacgaggcggaagattaaaaaatttccgcctcgttttttgaaaaaatatttttatttttccgcctcatctgcagcaagttcacgaagaatgatctccgcagtcttcttcacagtagcagctacaaagtctgtacactgtgctttacgttccggagaattcttctctttgccttttgtcagaacacggcagcatgttgcaccacagtattccttgaagaaatcgtggatttcgttcgaaagcttgaaacagcggtttactttaggatctcccggtgtctttcgtccgaaaaagtaaccgatgcacatggttgctccggcaagcgcaccgcagatacatccgcctcctccaagtccccatggaaaaccggaactcatagcgatcgcatcatcagacatgtccagttcaaaattctccttgattgcataaatgacagattctgaacaggcaaaaccctgattaaagatgtctacggcatccttttgaagtttctctaaatctacatttgttgtcatttcaacccctcctaaaaatgtattaaattcattatagcacagcgaaaagaacttgtatatcatatggggagagggtaaaatgaatatgagacagggcattttttatttgggacggaggatatagatgagaataattaatgtaaatacgatcacacagaatataaaagatatgtgcataaaagcaaatcattttctggcagaggatatggatcaggcgatgaagcatgcgttggatacagaacagtctcctcttggacgccagattttagatcagctgcaggataatttaaagattgcagccgaagatatgattccaatctgtcaggatacaggtatggcagtcgtatttctgaaagttggtcaggatgtacattttgaaggaggcagcctggaagatgccgtgaacgaaggtgtacgtcagggatatgtggaaggtttccttagaaaatcagttgtaggagatccgatcattcgcgaaaatacaaaagataacacaccggcagtcatacattacagtattgttccgggagataaagtagagataaaagttgctccgaaagggttcggaagtgaaaatatgagccgtgtatttatgctgaaaccggcagacggaattgaaggtgtaaagaatgcaatccttacagcagtcagggatgcaggaccaaatgcctgtccgccaatggtagtcggagtcggtataggtggaacatttgaaaaatgtgcactgatggcaaaagaagcacttacaagagaggcaggatcacactctgagatcccatgggttaaagatctggaggaagaaatgctggatacagttaataaacttggaatcggcccgggcggacttggcggaacgacaaccgcattagcagttaatgtgaatacttacccgacgcatattgcaggacttcctgtagcggtcaatatctgttgtcatgtaaatcgccatattatcagggaggtgtaaatactatggaaaagcatatcacagcacctattacaaaagaaacagcaaaatctcttcacgctggagattatgtatatgtcaccggaactatttatactgccagagatgcagcacataagcggatggacgaagcattggacagaggcgaagaattaccaattgatatcaaaaatcaggcaatttattatatgggaccatctcctgcaagagaggggcgtccaataggatctgccggaccgacaaccgccagccgtatggacaaatatgcaccacgtcttcttgatcttggacagacagcaatgatcggaaaaggaaaaagaagtcaggcggtaatcgatgctgttgtgcgcaatgggtgtgtatatcttgcggcaatcggaggagctggtgccttattgtccaaatgtataaaatcatcagaggttgttgcatatgaagatcttggaacggaagctatccgtaaacttcaggtagagaatcttccggttatcgtagtaattgacagcgaaggtaacaatctgtatgagacagcaatcagggagtacaaaaagatatgagaagaattcttctgatggttataagaaatattttgtttgtgccggtttattggtacaaattatgttatcatgcaagacatgttgaaaagtatacagaggaagaacactatgaattattaagatacatagatcatcgtgccaatacttcgggaaatattaatattaaagtatatggacaggagaacatcccggatgataatggattcatgttctatccaaatcatcagggactttatgatgtacttgcgattatggaagcgtgtccaagaccattttcggtagttgctaaaaaagaagtggctaatgttccatttcttaaacaggtttttgagtgtatgaaggcttacatgattgacagagaggatgtccgtcagtctttacaggtaattgttaatgtaagcaatgatgtaaaagcgggaaagaactttcttatctttccggaaggtacaagatctaaaaagggtaatcaggtacaggaattcaaaggcggaagtttcaaagcggcaaccagggcaaaatgtccgatcgtgccagttgcgctggttaattgttttgtgccatttgattccaagacaacagaacaagtggatgtacaggtgcatttcttaaaaccattactttatgatgaatataaagatatgaaaacaacagaaatagcagccatagtgaaagaaagaatacaatgtacgattaacagtagtctttagatctttagaataaagaaaataggcatatatataatgtaaatatatgccagtaaagaaaatattagaaaaatgcgaaaaagtaattgacatacgtagaaaggcttgatataataactttcgctggagaaatactcaagaggctgaagaggcgcccctgctaagggtgtaggtcgggtaaccggcgcgagggttcaaatccctctttctccgttaggtcagtgagaactgtctgaaacgagctttcagatagtttttttacggccatatatgatactgggaaatgtatttaaaaggaaaaataaaaaagatgaaaaaacatcttgacagtctataaaatacatggtattatatacaagctttcgcaaacaaattatttaaaagatttgtaaaaagaaagcaaaaaataaattaaaaaagttcttgacaaacagttgagagtgtgatatactaaacaagctgttgaacaagaaacaacaaagaaccttgataattaaacaatagacaacaaccctgaaaattctaaagagaattattcagaacagacatttaatgtttcttagcaggtttcattcgtaaggcttcctactttttatgcaggtccgggtaatcatgccttcctgaattaaatcccaaaacaatatttgcagtttaagaaagcttatgttaatatacattcatcgacagctattctgtctgtcggataaattcaaaatatataagaatcgggtcttgtatatttcaaaatagcgatagctattcgtgagggaaatcagaagataattcacagaaaattttgaaacaaaggaaaaatgagaagcatatttgcacgattaatgttgcagaaaaaatatattttgcttatactaagagtaaacatccgggattttttcgtgcaaagtgcggaaaggagtccggatgggaaaagaaaacagagaagtaaaaagtagtgtactggtagatttgatgtatgaagatgaatctgcagaagaaaatgaacgttctttttataatgccttacatgaggaacagttaccgaacaatatagagattaagaaactgagagtagaaaatgttgtatatatgaattttaaaaatgatttttcattcaaaaccagagatcaggttttagttcttggagaacatcagtcgacattgaataacaacatgcctctcagagaacttatgtatatcggaagagtattggaacagttaattccgataaaagacaggtataagaaaggacaggttcattttcctacacctgaattttatacattgtataatggcaaggattttatggaaaaagagaagatattaaagttatcagatgcatttgaaacgaagagtaatgatcctatgctggaattgaaagtccgggtaattaatatcaatccagaagcaggacatgaattattggagcgttgtccgataatacgggaatatagtgaatttatagaaataatccgtaaatatcagaagaaaaaagatgtagagccatataaacatgcaattgaagaatgtatagaaaaaggaattcttgcagactatctgaaaagaaaaggaagcgaggttgtaaatatgttaacggctgagtatgattatgagacagatattgaagtacagagaggcgaagcatatgatgagggaagagaagagggaaaattggaggaaaaaaagaatcttataaaaaatctatatgaagcaaaatttacagttgctgagatttcaaaactgttaaaaacaaaagaagatgaagtaaaaaagattataaattgctagtaaaagggagctgatcgtagttgatcagctctcttttcatccatgtttccggtaacaaccggggacttctttgtaataaatcggtcgggtatccacagccttctgaattaaatcccaaattaaatctcaattttagcaagcgctgcctcatccccaaccaacgtcacatcattatgcagctggagaatagaagccggcacttccggtgtgaccgggccgaagaaagcacgctctacgatatctgccttgttttctccgttcactactatcaggatcttctttgcctgcatgatcgtcttgattcccatcgtatatgcctgttttggcacatcgtcggcagatgcgaagaatctcttatttgcctcaatcgtactctctgtcagatctacacaatgtgtttccttttcaaatgcttctcccggctcattgaaaccgatatgtccattatgtccgagtccgagcagctgaagatccacaccgcccagtgaacggatcagttcttcatatcttccgcattctttttccgcatccggctccattccgttcggaacattggtcctttccggatcaatattcacacggtcaaacagatgttgatgcataaagtaataatagctctgatcattcgtacgtggcaatcccttgtattcatccagatttactgtcgtaacctccgagaaatccagatctcccttgttataccattcaaccagctgatcataagttccgattggcgtagatcctgttgccagtcccagtacacagtttggtttcatgatcacctgtgcagagatgatatttgctgcttttctgctcatgtccttgtaatcttttgctttgtaaattttcataagtacaacctcccaattgtatttgttactttcttttcaaaattactgcattttcaaaatactccggtagatgaaaattcggctgttcgctttctacgcatctgtacgctgcataatgttcgtattcctttgtttcacattccattgctcttcctgtatttctgcgctacatttcatctgccgtatcatttcctttaaattgaaaaaagcctccatagtgctgtccttgtaaaccggatcctgatcttttttataaattcggagaggattcttctccacacacacaagtttgatatataatccttctcccggaacgaatccaatatatccatacgtttttgcaatcttttctgttccccataacagattttcgattttaaacaactctgctgattctaataactctttgttttctatcaaccggacttccgtatgctgactcctgttgcatggttaatggcttctatctcaatctaacaaatataaccgagaaaaacaagattgtataaaatcaaagagacaaacgtacaaaaaaataaaccaatcgtgacagcattctttacgcaaaaaaccgccagtgcaatgcactgacggttttcaacattcaatattagtcctgtacgtatggcataagagcgatgtgacgtgctctcttgattgctactgtaagagctctctggtgcttagcgcagtttccagtaattcttctaggaagaatttttcctctttcagagatgtactttcttaattttgctgtatccttgtaatcgatctcgttattctcttttccacagaatacgcaaactttttttcttctgcgtccgccgcctcttctcttgaagccgccttctggacgatttcctttatcgtaagccattttggtttctcctttcaacaaaatgaaatgcggcaagtaccacagcacggtactattgcctaattaaaaggtaattcctcatcaattccatccggaatgttcatgaagccgtcacctgcatcagatactggtgtggctggtgccggagccggtgatggagctgccgcacggaaacttcctgcattggcgtcgcttactgccttgctttcagcaaattcctgatcctctacaacaacatctgttgtgtaaactttctgaccttctttattggtatagcttcctgtctgaatacgtccggttacgataaccttcagtccctgacggaaatatttctcagcaaattctgcacttcttccgaaagcaacgcatccgataaagtcagctgtctgctctccgtcgttgttacgtctgaatctgcggtctacagctaatgtatatcttgcgattgctgtagaattctcaccctgtgaatatcttacttcaggatctcttgtcaagcgtcccatcaaaattactttattcatattatacctctacttcctgcttatgcatcctgtctaacgcataaaaatctgataacgttgtccataatgcgaattctctgctcgatttcgcttggagtctcagcatcagactcgaagtggatgaaatagtagtatgcttctttcatcttctgaatctcgtaagctaatctcttcttaccccattcatcaacgtcagagatctgtccaccgaaacgttcaactaatgctttcaccttttcgattacctgagctctttcgtcgtcttcgatttttgcactgacaacaacagctaattcatatttgttcatgtcgtcttgcacctccttctggtcttttggcccccgctcatcttatgtgggagcaaggatttctgtctctattttaggacagaattattgtatcacgagttcttatgttaccataaagtctcgattttttcaagcttttttcttcaaatcttttgtatttttttttaccaatttgcgggcgatcatgatctgatgtccgcatcccatacatttcagtcggaaatctgctccaacccttagtatctcccattctttacttccacatggatgcggctttttcattgttaccacatctcctacttcataggtatattctttcttcatcactgtttcgtctcctcctcttttacccctcttacaacaaaccggtgattatcactggcactggtacaggtcgacaatgtaacgattgtatctgccgttgtcacttccacaccggtattatacagagaagtactctgcgtcatattcaaaaatttctgatattcttcatctgtttcaaatgttgtctgatacgatttcgaagtgtcgactacctgtcctgccgaataaatatgatatttcagaattcttccatcaacggtatatatgtaaaaatacggattattcttccagaattcacgggtatcataatcctgcaggtgacggaacatcgaaccgtcccgcattctatgtccatatattacagagtttttatccgaaaaatccttttgattgtcaacattcaggaagattgctcccagcgtattttcgttagacgaaaatgttttcttcagatatttactgttatccgttccctgaacaaccggataattgatctgactcggctcatccgggaatctgatccatgcgatcgtatccggattgatctccagcagtttttgaaaatcaacagaaaatgtatcatctccgtcttcactatgatttttatctttatcatttttattcttatcatccgtcaccgcaagtttccgcactttatcatactcacttcttccatccagataaccttttccgatcttaaacagttgaaagcccgacacacagaatacgattagtgcgatcacaagaatcacattggcgattatattcccttttttcttccgccttcttccgcggtgatgtttttttctttcattgtctgcattttcatttctcattccggattcgatccctccctgtgctgttctattttctttactttttcgattccataatctctacgatcgtcttttccgtccctgtcattcctggggatgcgatcattcccatgtacttcatagttgcttccggggtcctgccgttgattccatgaatattttctatgcagatatcatccattgccatatctgttgcacggaatgctgcatctactgccacgatccctttcatcgtacatccgtgattgcctccgtcacagatcattccggtcaaaccgcttgccatattctgaatcacttttgtatgtttttctccatccgctccctgcagatatgccagtccacaggccatcccggttccggctgcaatcccgcatccgcaaaatgccgataatcttcctgagtactctttgatatacatcgtgatcagatagctgagtgcagttgctctccacagggtctcatcatccgtcttatcttcattggcatgccggtacgcatacaacggcatcgtcgcaatgatcccgtgtgcaccgctcccggtaatgctcatagccggtctggaaaggcccagaaccctggcctctatcgcaccgttacacagtaattgcgcagtcttaagcgcatcccgggatatgatccggttgccattctcacgataaagtttctttgcgaacactgccctgtccgaagccagtccttcttttaataattccagattcatcgtatacgctttttctataaacgcaatctcttcaagcggaactgtatttacataccgcaggatctctgccagggaatatccgtgaattaccggacgtgcctgctttttccgggattcctccctgtacatcttatcttctgtctcaaatattacaatgccgtctttttctatctttacgatattcgtatgtgcatcccggatcatcaccttacaccggttattctccgttgtcaccacggcatcgatcgtgatctcggatccgacatgatccataaccacttccaccagaccgtcgctcaccatctgcgccgctttctcatcatcttccggtgtgatatctgccagcgattccagtcctttttccgcatctgccgctaccgccccaagtgccgccgcataatagttgccgaatctctccgaattaggaattccacaggtaaatgcattcttgtacataccggaattcaatgccacatgtacatttacaatcttaccttccgtatatttcttcgcacttgccacggcaaatgcgatagctcccggctcggtcacgccaagtgccggtttcatatcttctctgatcagctccgtcagtttctgcatattctgcctcctccccgttatcaaccctgttctacgaaattaacattcttatcttaacacatccaccacagtttctgcacttttctcatctaaaatctttagaaattttaatactctgtttattgatttttcctattcccggcgtatgattaaatgtatattgcaagtactattttaagaggtgaatgaattgaaactaaaagacagatttatacgttttatgtacggaagatatggtgttgattcctttggcaaatttaccatctggggatccctgatccttatgctgatcgcaggatggacgcatcggggaatcctttcctggctggcatgggccggtatcatctattcttatttccggatgttttccaaaaatacttacaaacgagccgccgagaatcagaaatatctgcagatgacacgcggcatccggacatttttctacaggcagcgtaacatgataacacagcgcaagacacaccacatttacaaatgtccgtcatgcaaacagaagatccgtgttccaaaaggaaaaggcaagattgagatccgctgcccgaagtgtaacaccagatttatcaaacgaagctaaggagttcccatgtttggttatatttctatcaacaaagccgagatgaaattcaaagattatgatgtctatcattcttattactgtggactatgcaaagtcttaaaagaatgttatggtagaagaggtcaggtgactttatcctttgatatgacatttcttgtgatcctgctcaccggtctttatgaaccagacacaaagacagagatggtccgttgtattgcacatcccatgcaaaagcatgcggcaaagaccaatgaatttactgaatatgccgcagccatcaacatgctgttatcttattataagtgtgaagatgactgggcagacgaacacaggaagaaagcttttgttgccgcaaaacttttgcattcaaagataaagaagattgaaaaattatatcccgtaaaatgtaaggtcatctcagaaaatctcgcccaaatctcaaaatatgaggcagaaaatgaacagaatctggatcttatgtccggactttttggcaatatcatggctgagatttttgcataccgccacgatgaatgggaatcctctcttcgtaagatcggattcttcctcggaaaattcatctatctgatggatgcctacgatgatgtcgaaaaagacatcaaatccggcagctataatccattcaaaaaggcatacctggacgatcctgcatttgcagatgactgccgcagccttctgacgcttatgatgtcggaatgctccagggaattcgaacagcttccgatactgctgcatgcagagatcttgcggaacgttctctattccggagtatggagcagatacactgccgtaacatccgaaagactcgccggcaagaatacacacaacgctgcagatactgctgacggcaattccactgccggtagaaccacgaatgataatccacatcctgacacagataattcaacaacaggagatcaagaacaatgacagatccatatagtgtcttagaagtatcccgtgatgcttctgatgaagaaataaaaaaagcatatcgtaacctcagccgaaaatatcatccggatgccaatatcaataatccgaacaaggatcaggcagaggcgaaattcaaagaagtccagcaggcctatcagcagatcatgaaagagcgggaatacggctcttccgggaattacggtccatatagccagaacggatatggtccgttccgcggcttctacggagaataccgacagaccggtaatgcaggtaatgcaggtcaggaaagtgagcaggatcttcacttaagagctgctgccaacttcatcaacaacggccggtatcaggaagcaatgaacgtattaaacggaatcaacgagcatactgcccagtggtattactacagtgcgattgccaattccggtctcggcaacaatgcaacggcccttcagcatgccaaagaagcgctccgcatggaaccagccaactatcaataccagatgttagttaaccagtttgaaagcggcggaagctggtaccgccaacgccagaatccgtataccaccaccttcggcggcggaagcgactggtgtgtaaaattatgtattgccaacatcgtctgcaacttatgctgcagcggcggaatgtgctgcggtgccccgggcggttacagcggcggccattatatgtaactcatgaaatttcaatgtaatccagatgtacaataaattgtgaccatcagcaaacgcaaaaaggaggaattcttatgttagattatcttgttttatatcagagtgaatccggaaatacaaagaaaattgctgcatctatcttctcgcgccttcccggcaattccaaagatctgatcgatatcgatacagataaaacaattccggaagccaatgtctacttcatcggattctgcgtgcaccgtggaagctgcagtatggaagtcagtgacttcttaagtgacttaagcggcaagcagatcgctttattcggaacttgcggaatgggggattccccggaatattataaggatattgccggacgcgtcagtgcctggatcgaagcagacaacgattatcttggatattttatctgtcagggaaagatgccgcagaaggtacgtatgaagtatgaatccatgagaactgacgagaataacgaccagatcgaccgttttatccagaatttcgatcttgcacttactcatccggatgatctggatgtggagcatacaaaagtattcgtcgatcatatgttaaagaagattcaattataatgaaataatatacgagaggctgccaccggcagcttttcttgtattctttaacacaaaaaacacccgaaaataaatattccgggtgtttttataagaggcgccaaccagatttgaactggtgatagaggtgttgcagacctttgccttaccacttggctatggcgccatatgactccaacgggaatcgaacccgtgttaccgccgtgaaagggcgatgtcttaaccgcttgaccatggagccgtatatttatttgtcattgtgtttttcacacgaccgagatttaatatatcataaactcggttgtttggcaagtgtttttttgaattttccaaaaaatttttatttttcagattttttcttattttctgcggacagcaaaagctttgcctgcttttttctgtccgcatcttgtccggttcataatcgtaataacgaatccatatgtcccttacagaagtgtatgatataaaatcaaacgtgttacatcagaatcagatcttacatgcccctgtcgttatcttaattattagcgattgtgatctatcctgtccatatgctcaatcagccggaatatctgacttgtatatccccactcattgtcatagaaacaaatgaccttgaaaaagtgggaattcacttgaattccctgccttgcatcaaagatcgatgcatgtgaatctccgataaaatctgaagataccactcatcttatcctttaaagccggaatgacaagtgagattgcttttgcggctcccgttgtagatggaatcaggttaccaaatgccgaacgtccggttctccagtctttctgggaacggctgtccacaaccttttgttttgcagttgcggcatgaatcgttgacatcagtccatattcgattccataattatcttccagaactttacagattggtgcgagacaattcgtagtacatgatgcattcgatacaaccggcatatccgatgtatatttgtcatggttaagacatacttgtctgccggttatcctgttccagtctctgttgttagaggggcactgtttttggctctttctgattctttttgtactctgttgtcaatgtaacataggacgctataaaatgcaacacatcaaaaagtaattaaaatattaacgattttttacatctgatcggctttctcgacgaatccccggatgacgttacatgaattatgaagctgctctttttctttctctgtcagggagatttccagaatctcttccacaccgtttttcccgattacacatggtactcccgccggaacaccctgttctccatattctccttcaaggagaacggataccggaaggatcctcttttcatcatgcatgactgctcttgcaatattgctgagtacggcaccgattccaaattctgtacagccttttccttctacgatgtgaaatccacagaccttatcctccgcactgatcttatcaaaatccattttatcccggtattccggatgaatgctcaggtattcttttaccggtattccgccaatctgtatatgtgataccggaatgaactgtgaatccccatgctcacccatacaataagcctgaatggaatgacggcttacgccggtgatctcagataacattctgcggagtcttgctgaatccagagatgttccggtgctgaatacctgacttcttggaagtcccagtctttttcttaagaaatcagcaatgatgtctgccgggttggaaatgctgatcagaattccatggaatcctgactcttttaacggtcctacgatcgtattcatcatcttgatcgaatcatcgaacatatccagccttgtctgccccggaagacggctctttccggccgccatcacaacaatatgagcatccgcacagtcggaataatctccggctctcactgtaaaatctctgtccagattagaggccatatcatcaagatcaagtgcctgcattaccgctttattcttatctatatcaatatatacgatctcatctgccagtccctgcatcataagactcagtccgcaatgagatcctacatgtcctgctccgataattacaattttcccattttttattgctttcatttttcattcctccgtccttttcctggtagtgttaatatgttattcattctagcactattggtactacctgtaaatagagtgcactctgttttttgctttttggaattgcaaaaagctcctcaactttcgttgaagagctttccgtcttttaaaaatctagagaatggattttttagaagcacatttttcggggttgaatattcattcttttgtacttctcatacaatatatcatatgaaattcactatgaatatagttttaatcgacagattttattctataaattgtgtgtcgcacacaattatgataaaatatatctatactctgatcaacatatatcaggaggaccacacttatggcaattaaattacagtccctgtatgaagcaattaacaaccaatttgatgtcatccttcataccaatagtttttatgataaagaagtaacctggatccataccgtcgaacagggtgaattctcccatctgctccacggtgatgaactgatctttaactccggtctgaattttacctctcaggactggctgaaagagttcttaaagtcattgaaagatgcacacgccagcggactgatcatctctgtaaaatcacgtcctgcattttcccaggagattatcgactattgcaatgagatacaactcccgctgttctccacttcctgggacactccgttcatcgatatcatgcggatcttttctgagattctgttaaaaaacgaacaccgcgagaccagtcttgccgctgctttgaaaaatgcgatctattaccccgagaatgaagactcctatctgaatcctctggaaagcaatggattcttccgcgacatgaactataccatcctcatgatcagctgccacacttatgacagtgattccggtaattcttacctggaacagctggaaaagaagatccgttatttcatgtctaaagggatcgtatatgaagaagggaagcatctgatcgtattgtttgccggtgaatctgtaaacgatatatctcagaagctctacgatgtctgtcagaataactccgatgtctatgtcgggatcggaactacggtctcgcagcttacagacattcaccgctcttacgagaccgcatttaccgcctatcagctcaccaaaactgctctcccgaagaacttccttgagtacgataagcttggtgtatacaaacttctggccgatatccacaatcaatcgctgacagcggatttcctgaactccacacttggcccgattcttgactatgacgctgtgcatcataccgattatctgcatatcctggaagtctactttgatcatgactgtagtatcatccataccgcaaatgcactttattgtcataagaatacgctgtcgtataaactgaataagataaaagaacttctggattatgatatcctgaccaatgagaaccggacaaacatcatgctttctttttatattttaagactggaaaagcgcagtatataaatgttcattttctcatcttctgcgttatttcaaagactgcagacctgaatctatgttataatttcaagtagaaatatctaaacaacataaacgtaggagggattcattatggatcagaatcgaatcaaacgaaaccagatgttaggcgcaaagattgtaaaagaacttacagcccgcaacatggaagcttattatacagactccaaagaagaggctctgaagaaagcattggaattaatctcggaaggaagcagcatctcctggggcggttccatgtctgtcaatgagattggcttaaaagaagctgtctgtcagggaaattatcatgtatacaaccgcgataccgcaccgacaccggaagataagcgcaagatcgagcttgcggcatatgattgtgattacttcctgaccagtgcaaatgcgatcacggaagatggaattatgatcaatatcgacggacattccaaccgtgtatcctctatcgctgccggaccacggaatgtgttgatgatcatcggaatgaataaagttacacgcgatgtagattctgccatgtcccgtgcaagaaatgaagccgctccgatcaatgcacagcgtttcaacctgagcactccttgttgcaaaacaggtgcctgtttcgactgcaaaacaccggatacgatctgctgtcagatcctgatcaccagatattccaagacaccgcagcgcatcaaagtcattctggtaaatgaagatcttggattttaacatacagattttcttgacttcatcttacgtatttgttatacttaacagtacgtaaggcatggcgccatagccaagtggtaaggcaaaggtctgcaacacctctatcaccagttcaaatctggttggcgcctcttatataacctcggaaacatcatgttttcggggtttttctatatctgaaaggagtatatatatgaaatcactcgtactggctgaaaagccatctgttgcccgcgatatcgcccgtgttctcggctgtcacaagaacatttccggtgcgatcgaaggcagcaattatatcgtcacctgggcactcggccatctggtcactttagcagacccggaagaatatgataaaaagttcaaagcctgggatatgtcttatctcccgatggttccaaagaaatgggagctcgtcgtgatcaaacagacatccaaacaataccataatgtaaagacacagcttttccggaaagatgtctctgagatcatcattgccaccgatgccggacgtgagggagaactggttgcccgctggatcctggacaaatccggctgtcataagccgatccgccgtctgtggatctcctctgttaccgataaagcgatcaaagaagggtttgcccacttgaaggacggtcgtgcgtacaacgacttatatcatgccgcaagaagccgcgcagaggcagactggctggtcgggatcaatgccacccgtgcactgacctgcaagtataacgcccagctctcctgcggacgtgtacagacaccgacacttgccatgatcgcacaccgcgaacagcagatccgttcatttaaaccggaagattattatggactgcgttgtacaacttctgttaccggtggttctgtcggtactatggcttctatcgtcacatggacatggcagcaaaagaaaagcggttccctgcgctcctttaacaaagacctgataaccggccttgataaaaaattaaagaaccagacacttaccgtgacggatgtgcatacctcatccaagcggacaccttccccgggcctttatgacctgacggaattacaacgcgatgccaataaacgctttggcttctctgcaaaggaaactttgaatatcatgcagaatctgtatgaacaccacaaggtacttacttatccaagaacagactcccgctatatcggtacggacattgttccaacgatcaaagaacgcctgaaagcctgcaatatcggaccttataagaaatatattccggaactcttaaagaaaccgcttaagacaagcaaagctttcgtagatgacaaaaaagtcagcgaccatcacgcgatcatcccgacggaagaatatgtccagatggaacatatgtcgaacaatgaacgcaagatctatgatctggtcgtacgccgttttatcagcgtactctatccagcatttgaatatgagcagactacactgaaagctgaagccgcaggtgaaacatttactgcaaaaggaaaggtcatcaaagccgccggatggaaggccgtatatgccgatgctgtatcttccggttcctctgcttcacagtatgatgcttacggggattatgaagattctgaagattttggagaagatttccaaaataatgatatgtacttaaaggcttcagagcaggcacttcctgttctccacaaaggcgacaccctgactgtcacacgcacgaatatcacaagcggtaagaccaaagctcccgcccgttttacagaagcgacacttctgtccgccatggagaatccggtacgttatatgtcttctgatgataataagatgaaaaaaactctcggtgaaaccggcggactcggaaccgtagcaacaagagccgatatcattgaaaaattgttccactctttcctgctggaaaagaagggaaatgagattcttctgacatccaaaggaaaacagcttctggaattagtcccggaagatttgaaaaaaccggagcttaccgcttcctgggaaatggaacttgccaagattgccaaaggagcacacaaagaacaggtatttatcaaagatatcgaaagctacaccaaagaattaattcaggatatcaagacttccgacggaactttccgtcacgataacctgactaatacaaaatgcccgcactgcggcaagcgtatgctctctgtcaaaggcaagaactcccgcatgctggtctgccaggaccgtgaatgcggctaccgcgagacgatcgcacgcaccagcaatgcaagatgtccgaactgtcacaagaagatggaactgatcaaaaagggggacagtgagacatttgtatgctcctgcggctacaaagagaagctggaagcattcaagaaccgtcgtgccaaagaaggtgccggcgtatctaagcgcgatgtccagaaatatctgaagaaacagcagcagcaaaatgacgaaccggtgaataacgcatttgcacaggcactggcgggacttaagttagataaataatatgcaaaaaggaataacaaacctttgctaatctggtttgttattccttttcagagagagaataattatttcattatcttttcaagttcccatgaccgaatgctttcaatcatcagatctccaccaattgctgtcatttcatttttctgatcatcatccacattatatatattacaagaaaaattattctgataatcattgctgaatatttctaatgaaattttgtcagaataaatatgaatatccagatgctctttgcccattaaattcaatggacatcttgcgactcctttactccagccatcggaattattacggtcaaaatatgcttccgctctcttcagatcaaataggatctctgtcttctttccctgagacattcttaagttcagcctaatcttgtctgcagttgattttttcagatttatccgcatttccgtttcataaacacagccactccgaagttcttttttctcgtcttcttttatcagaatgtccgcttcttcctgcttattcttccgaagatcctgtaattcttttacaggaacaaattttaatgtattgtcttctgctaacaccgcctctctcggaatgttaaagaatccgcaccagccttcttgatatgtcggcccccagtctttccaaaatggcatccaatcccatgcattcgcccatcctaccagaatccttctgccatccggtgccaggaatgactgtggtgcataataatcaaatccccagtcaatttccccggaggtcgtgtagaaaaattttccggtgtcatagtcaaaatctcctaccagataaacactggtgcgctcttttcctcccatcggagagaacatcaacacatatttatctcctaccggataaaaatccgggcactcccacatatagccccattcgcctctgctctctgcaaggacattgacaaattcccagtggaacatatctgtcgatttatacagtcttgcctgtgcaaatccatttttgcttgctccacagactacataataggtatcatcatgtttccatactttcggatccctgaacagatctgttggaacaccttccggtgctgtgatcaccgggttcccttcatatttttcaaagtggatcccgtcttcactatatgcgatacactgtgcctgttcaaacccatttccattattacaggttcctgtatagatcaggaataactttccatcatgttcaatcgcactgccggagaagcatccccccttcaaatgatcatcatatacttcacttggtgcaagcgctaatggcagatactcccaatgaatcatatcttcactgacagcatgtccccagtgcatacagtcccaaaatccggaatatggattatattgatagaaaaagtgatactttcctttaaaatatatcaacccatttgggtcattgatccatccggtttctgccataaaatgatagtcctgacgaaattttccctgctgtacggtttctctttttgcttcaatttctttctgggctttttctattctttcaatcatcagttcttttgacatattgtgcctccgatattattacttatattcttcacgaagcttctttgcaaattcagtattaagctttgattcccggcgggccttattttctttaattctgaactgttcttctcttgcaggcttatactcttcccagcgttttgcccatgattctctcgctgctttcatttcttctgttaattccggcatctgaagattgcgttctggaagtaccggtacatttggaattctctcttctacaggaagaatcgtaattggttttgctgttggcagtgtctgataccagtatgctgttgaactccagtcatctgacagatggttcgcatgtccatgttcaatcgtaactttcaaatgtttctcaaatcttactggatctgtaatgtgaaaacggtaagatacctggaatccatctgtatcgctttcatgtacaatagttccaaagaatggatatgcatttttctgcattccccatgcatggttgaaataatcctctgttcctgtaccatttaatgacgggtattcctctccatcaatgaagaacatatcatttccttctccccaccagcttccctggtagtgttttacagtaaggttacatcctacataatgtcccgttccttctacgtcaagcaccgtatagttattctcacctttaaaattggttacattattaacttccggacagtttgtctgaaggtctggtccccagccctgacaaggattttctctgtgccagcttgcatggaaatatgctgtattctcatccagtggctctttatacatttcatagtcaatattaaaatataaaataaatggaagttcgttttcatttacaatctcaatttttgcttttttattaaaaggcattgggaaatagcatgacacagaacaaggagctccatatcttcctgcttcttctggtttcagcgaaacattaaatggcagcgaagaaaaattgcccggataactgttaccaatacagaagaaatctcccaatggtgcaagtacacttggtgtatcctgatcatcccatgtaatcttgatcagaacttttctataatagaatggatcataatcatcccagataactccaagtgccggatgaatctccataaccggagctgctgaagcatttaataccggatcaagaatacttggtgctactacttttctgcaagaagaagtcatccagatatgtgtgatacatccaggtccttccacttctccaagagagattgtctcacctgccgggatttcccaataatcctgattcttacctctctgatcccagctggcaagtcttccgtttctggctttttttacagttgtcaaatctttaaataatcctgatacattgctcataatataagtctccttttctttttgttaataattatcctttcacagctcccgctgtcataccctctacaatattcttctggaataatccatagaagatcagttccggaacaataatcataagactggatgctacaattccaccataatctaccgtataatttcctttgaagaatgaagctcccatagaaagtgtataatcagatacatctttcagcattacagatgcatacggatattcattccatatgtataacacattaaaaatgacaattgttgcaataaccggctttgccattggcaaaataactttcaccatcagctgccagatgttacagccatctattacagccgcttcgtcaatttccgtaggaagctgtttcaaatatgctgtcagaagaagcgtattgaatgaaatcgaacttgctgcatatggaaaaatcaatgcccattttcctttcaacccgaaaaagatattaatcttatataccgggaacaataaaataaatggtgaaacagataatcccaaaatcaaaaatccatacaataaactctttgccttcggatgcttaaattccattcttgcaattacgaaagagctgcagaatgtaataataagttccaacacaacagataatatacatacaacaaaagtgttcgcatataattgtggaaagtttaatgtttccaatgcatgtttgaagttgtcgagattaaatgccttcggcattgccaatggattagacatgatctctgaacttgatttgaacgaaagcaataccatccataaaaatggaaatacaacaatcgctgttataatgatcatcgcagcatacattgcaattttctttcttttcggtaccattcctattcacctctttctcttgtaagtattgaataaatacctgtgatcaccagtgaaagaaggaatgtaaatgtagccagagacattccataaccataatctccactgttaaatgtcattgagtaactatatgtaaccaacgtctcagacagatggtttggacctcctcctgttgtctgctgcacaatttcaaagatcttaaacacccctgtaatgatcagaaccgctactgttgaaatcgttgatttcatcattggaattgtgacatacattgtcttctgtataaaactcgcaccatctatttcaactgcttccaacacctctcccggtatcattttaagacctgcaataaataccgttaccagatatcctaattgctgccagaaatagataatcgcgatactgtacggagacagtgtattgccgcctatccatttttgtttcaaaccagatgcccctatcgcatccagaacattattgataataccaatgtttggatctaatatataaacccagataattccaacaatgatcggtgcgataatggcaggagaaaagattaatgactttgaaaaatccactccttttaatttattattcagtaacaaagcaatgagaaaagataaagacaataacaatacaaatgccaatataaacataatcattgtgttttttaaggatatccaaaacaaacggtctttaaataatctcatataatttgtcaatccgttgaatgtagcctttccaattccagaatattttgtaaaactatatccaattgacattccaataggaataataataaataccatatacacaaccagtgtcggaattaccaatcctatcttgtatctctttttacttaaccaatgcatacgctcatcctctttatatccgggaccaccatgataaatcttcatggcggtcccatgcagtgtcagccaatattaacgtctgtctagtttgctgctgccgaatccatattttttaaagcatctttcggactgtatgttccttgcataacaccaaatattgcatcatacattgcttcctgaactgccggagtaactgtctggtccggagctgcttttggtgttttccatccatttccaagtgctgtgatcattgcattcattgcatactgtgaatctgttgctgcaataccatcataattggttgccgggaaaatggatccttcataagaaatctttgctgcttcttctccataataatatttcaaaaatgcatacacagcttcttttgctttatcattatcttttaccgctgaacttactaccagcggagctgccggaactttcattgcaatattctgttcataagaagaatcctcaaattttggtccccaccagaatccgatgtgttcaccgatatttttatcaaattctgcacagtcccactgacctgttccgaacattgctgcttttccttcattaaagagctgttttgcgtcaaaatattcgattgttgccatattttccggaaatgctccggcatctgcaagtccttttattttttcaaaacatgcattcatatcatcgtttgaatattttgccttatcaccagtataggatttttcattatctccccatccatatcttgaaaagaattcattgaactcccacattgagtatccactgttcttacttccgattgcgattggtgtaactcctgaatctttcagttttgcgatcatatcaaggaattcgtcataagttgtatcatctgttggataagcaatcccagctttatcaaacaaatctttattatagaaaaatccctgaacattactttgatatggaagtccatactgtacttttccatcattgaatgcatcttccataccatccagtgcatcatcaatgtctttattttctttcagaaaatcagacatatctaataagtatccggcctcattgtattccggtgcctccgctgaatctaaatgtacaatttccggaagacttccatcctgtgctgccagtttcatattttttgaatgtgcttctgtatcagctgctacgaattctactttatattttcctttattttctttgttaaatccctgaacaatattgtaagtaaccgtttcctgtttttttgggtttgccacatgaataccaaatttaatgacggttgccccgtccgcatccgtttttgcttcttctgatgacttacttcctccgcatccagcaagcagtcccatcgacatcgctgcaactaatactgcagatgtaaccttttttaaactttttttcttcatagtttttcctccctaaatgagtagatggttgtttatggaacccgttccatgttccttaaaaaaataattccgcatcttttctttttatggaacccgttccatgtttgttaaaaaaataaattcagctgtgcacgtgactgatttgtataatctatatataactcttagctgctcagatgtcaacattttttcgtcatttcgtttattttatcaaatttcgaatgctgtttttgtgcatttttactatttcattgttgttctcccctttctcacagatactcctaatgttactttttcatttttatatgtcttcccattaaccaattcacaaattaacctggccgcctcttttgccagttcttttatcggctgaacgattgaagtcacacttggttctactatctgcgtaatatatgttccatcataagccacacattttacatccttcggaacctttttatgtcttcggataacctcattcatacactcgattgcaactagatctgttccgaatatcccatcaaattcccattcatccagtctgtcaaacaaatcttttaccgcatacttataatactccagatcaaatttattccatgccagttcataatcaaagcactctactccctgttccttcataattcttgcgaattcaaaatgtctttcgtgatatggcgactctactgcagttgaacctctgaaatgtactatttttttacacccattcttaagcagaatttccgccgccagtcgtccgccctccttatgatcgactgcaaccacaggaatattttctcccaaataacggtcaaatgcaacgattggtttttttatctttttgtactcttctacatctaaggaatgtacacctgtaatcacaccatccacgatatgcctgtttaacatatccagatattcgagttctgcattatgtgccttatctgtattacctaacatgatcttgaatccttcattatagagttctgcttcaatattatgtacaagttctgcaaaaaaaggaatttctactgttggcaccagaacggcaatgatcccactctttttacgatacagatttctggcaagttcattcggtgtatactgaagatttttcatagcctcttctattttttcacgtgtctcatccgatacatatccactgttattcagtactcttgatactgttccaacaccgactcctgccttttgtgctacatcttttatacttgccatgtttacaccccctctcattttaataatttattataacagaacatttacacaagctctagtttcatttttcgctttgttatatcttcatgtatctttaaacgcccaaattagaaatattactcttcttcactcttcttcaacttcgaataataactatccgcagtataaagcgccgccaccggattatgccccagtacacggtctttcgtcactgctgtcgtagtcagtgcctcggaatatttgtaaaacagactgtcatgccccacacaaagtccgaccacaacattcaggtccgtcttcgccttgttcagaagctttgcctgcaggatcggattacacatattcacaccgataccttcgcagcattccgggatgccgaccgatgttttcttctgtgtccctgccttgcagccgacaccatacacctcaaagccgtgtctgcgcaggatatctgccaggatacggctttctttcaacaatccgacacaggttgcgatcccgatctttttcgcattaatcttctttgcgaaatccatgatttcttcgacacgggtatgtttgcagtaattctcatactctacttcagctgcagcgatcgttactttacggttgtcatcctcgttgtagcactccattgcttcatttaagacttcttcatccatgtgtgttgtcagacagaaatccggataggttttatccattttgttacagttttttactgcgcagtcgatacaagacatgtcttcttttttcattttttcattctccttttgtataccttggtatctacagagacctgccactggcagattctctagattaagctttactttgtaaaatatcctctatttacttcataataacaaatacttatactacagacaatggttttccgtttttattttcttattttttgtagttcttttctatgagaaacgttcccctattcagggttgatttgtcatgaattgtcgattctgatttttgaaaaattattgaaaattaacatttaaaatttgaagatatatgacagtctctctgatagaccatcatctgtgagtttatactatcatgtatactatttttcgtcaataaaaaggagattattacactcatttattaataagttataataatctccttttttaatcatcgcacgtttaaaatctgtagtctttttttacttttccgctatctcttgctccggttcttcatccttctccaacacaagtatatccgcaatactgcatcccacataatcgcagatctttgcgatcgtggccagatcaactctcacgactttgttcttacaataattattcagctgggtatgctgcagcttacatgcatagcataactgattcttgctgatcttcctctcttttaataccttttccagttcaatcttaattctactcatctttcgtaccatcctataactgaagtatactaagatttcggttgaaaaaatagatgtgataacttacactgtatttatatagatgtatttatatacactgtaagaaattaccgtttaggaggtttgccttggaaaaaagaaatatccgaatcctagctatattattgatcattgcattctttttctcctttattcaaaccagaccttattctgtcaggcattctactgtctatactaatgataatacgctagaaatcgagctatatatagtaacgaatcgtttcttcgtcatccatccggatcagtattgcaaaaaaattattcagaagcaccggcgtattaacaagctttccgctgatacgacttatcagattgttctgtttgcaaattcatggtgttttaagaaaggatattcctgcgcagaatatgaatatcgggttgacaatgataagattcaattacagaaataatgtattataaaaagcacaaacctcctttttaataagcagaaggcttgtgcttttatattgaaatattgaaaaaagacagaaatcaaatcgatttctgtctttaactccccgagttgggttcgaaccaacgacccttcggttaacagccgaatgctctaccactgagctatcgaggaatacttatatagtataaacccttttgtctcttttgacaagggcttttacttactttttttattttatgtaccttcaaaactgcatacaagaaatatttttttcatcctacctatcaccttgcttggtcatgccctcgaccgctcgtttttaggtcaacttttttgctttagaatttccccatgttggagtcagcacaggctgggaccttgtagttttattctggtcggtgacagccgccatgatgcattaaatagaaatcaattctaaaattcgaaactcctctgcctctttccctatctgacacaacaaacaccgcattcccgcatccgtgatcttaccatccagtgtcatggttactttctgattcccattttctgtcatcagattcacagcatcaatctggattccatttaactttgtcatgttcacgaacaggttcagatcacttgtctcttttgggcaggtaaatccaatctttacctgtgtatgttcggtctcagctgtcagtcctgctgccgccagagctgccgtcataactttttcctgcatctctggtaataattcatattcatattttctgcaaaggctcattaagtgtctcaggaatgttttatattcttcctggatctccggatccacatccgtggctcttttttcaatgatttcaagttctctttcgagaacaaatacatctcctccggtctgagcttttacttctgctacatgtttcccacactccatgcgtttcagaaacagtggtttcatctgtgtatccaccgcatcaatacctgcacgtacttcttccaatgtcataacttttttcctctcttactatcaacatatacgatcggcataccagaatatcttctataataaagctccctgtctgtccagttctgctctgatctttcttatatctgcttcgccgtattctgcctgtacagcggctgccactccggccgaatgtccggtggcaaaacaggttcccataactcttactgccgcaaatgctgcttcatttgcagatatcatccttccggccgcatacagattcccgatattatctgactgctaagccccaagtggtatatcgaaccaacttccttcttttacatccatatatgttgccatcttatctgtatctttgtggatctccggtttccatccgcctcttgccacaccatcttcacatttttttctgttcagtacatcttccgcttttatcatcgactttcctttgattcttcttgtctcacggaaaccgatagacggaccgatcatcgtcagttcacattgctccatccccttaagatatctgcggaatgcctctacataatacaacacctgtcttctggtgtccagttccatcttcgtaagttcctgactgctaagcccggtcggcataacacttggaagtaatactgctacctgattcgatccttctcttttaagaataaatcctttttctcgcgtgagatgctggattcctgctttttttgccttgatcacgacctgttctacagcttccggagtcagatcacaggatatatcaacgtcacttaaccgaaatggaagagttgcagcctgtacatttccctcttcatcccgccagacgtattctcaatgatacagagcagttaaaatacagcatgttaaaatacagttctttgcagacaggaactctgaaactaggcatgttatggattggaggttatctgaatcttccacagctgatcacggattatcatgaccgacatccacttgtcacctgccatcttgatgtagaaggaagcaaaacactgtttcatatgcttaaagcaagagatctgcatgcaatcttcatcatcggttctgaaaaacagctgcgaaaccagtcagtctgatattgtaatacagcttgcctccaacaatctggccattggattttcttcaaactcaattgcagtccggttaaagaatccgggatgtaagatcgtgccgcttgaagttactttatcaagaccgatctactatgtaacacacaaagatatgctgaattatccgaccgttcattcctttacagactttataaaagacagatttcagccagataaaccaataccgtaaaatgacttgcggatttctctcttcaccagttataataaacaggagaaaatcaatctttgggggattattatgataaaaacattgttcaaacacatttcaaaatactacaaggacacttttgtcctggccatcgcaggtgttgctgtcggcgtccttgtcggactcgttgatgcagcattcgggctgggacttaatgcctgtaccgctatccggacgaaatacttctggtatctgatctggttcctgcctcttggcggcgtcttcatctggttcatctaccaccagtttggcaaatctgtcgccaatggtatgaagatggtctttcacgtcggccttggtaaaaacaccaaacttccaatccgtatggtgccactatccgtcatcggaacctggacaacacacttgtttggaggaagtgccggacgagaaggtgttgctgttcagattggtgcggctgtttctaataatataggacgtctggttgataagaccatcgatattgagaacagccgtaaaatgttcctgatcaccggtatggccgccggattttccggacttttctgtactccgcttgctgcaatcttttttgcattggaagtactggttgccggaaaacttgaatatcatgctttgattccagcaacggtagcctccatcagcgctgcatttacatccagaacactcgggcttcggaaattccatattaatatactggaaaccttgaattaccacccttctacctacaatgccgttttactcttaaaactggctgcgatgggactggtctttggtatcgttggttctttatttgctctgattcttcggtatctgcgtttaaaattcgctttccgtttttcttcacctgtaaaaaaggttctgattatgggatctgttgtcgcagttcttatgatgatctttcatcagggaagatactccggaacaggctctaacctggttgctctgtgctttgacggtattacagacgatatatatgcttatgactggattcttaagatggctcttacgattcttacactttcctccggattcatcggcggtgaagttgcacctctgttttccatcggttcctgcttaggatatgtacttggaccggtattcggatttgatccgatgttcggtgcagctcttggattcgcttccgtgttctgcagtggatcaaatactttacttgcagctatcctggtcggcgtggaaagtttcggatataatatgctcccattcttttcggttgtatgttttgtatcgtttatctttaactttaataattcgatctttacagcacagagagttgcatttacacatcctgtacggcatcagcggttgaaacagcggattgcaccaaagggaaattaacgtattagcatatacatagtagttcctgcaagtagcaatgtatcttacatactttgtatctacaggacttaccactggcagctctttacgaatgcatggcaataaaaaataagtgtacattctcccaccgaagaattgtacacttatttttattctcttatttcaatcttaaattcctataacacaatttccgagtcttccagaacctgcctcagactcctatgccatgattggtttcagtgcctcagcaagcttgtccttctcagcctgtgcctcagcaagatcattaccaagtgttgtgtagtaaatcttaatcttaggctctgttcctgaagggcgtacgataactgtctcattgttctcaagcttgtaaactaatacatttgctgcaggaagtcctgtttcttctgtcttagtataatctgttacttctgttaccttgtatccagcgatctctgccggtgcattctcacgcaggttctgcatgattccagacatcttgtccattccactgagtccagggaattcaaagctgtcgatcttgttgaggtaacgtccgtactctgcatagatctcttccagtctctgtttcagagagctgccgatacttctgtagtaagctgccatctcacagatcagcatagatgcgataacggcatctttgtcacgtacatatggtcctgcaaggtatccgtagctttcctcaaatccaaagatgaatctgtctacttcgcctgctgcctctaactgtgcgatctggtctccgatccatttgaatcctgtcagtacgtttcttaattctactccgtaatgagctgctactgcatcagcaagtggtgtagatacgagagattttactgctactgctttttcaggcattgtacctttctcgatacgtcctgcacatatgtaatccagaagaagtactccgacttcgttaccgcttactaattcataagatccatccgggcacttcatagcgatacctacacggtctgcatctgggtcagttgcaagcataaggtctgcatctgactcttttgcaaggttcagtccgagctccagtgcctcaaagatctctgggtttggatagctgcatgttgtaaagtatccatttggatattcctgctccggaacgattgtgatatctgtgattccgatatcttttaatacctgtgttacaggaacaagacctgatccatttaatgggctgtataccagttttaatccggctgtcttacacagtcccggacgaacctgacgggattcgattgcatcataaagtgctctcttacagtcatctcctacaaatctgatcagtccttcttctacaccttctgcaaatgacatatattttgctccggtcagaacgtctgtcttctggatctcttcgtatacgattgcagccgcatcgtctgtcatctgacatccgtccggtccgtatgctttatatccgttgtattttgccgggttatgagaagctgttaccataacacctgcattacagttataataacgtgttgcaaatgaaagtgccggtacaggcatcagtgcatcgtagattcttactttgatcccatttgctgcaagtacacctgctgctgtcttggcaaatacatcactctttaaacggctgtcataactgattgctacagtctgtgttccgccctgtgtctttacccagttagccagtccctgtgttgcctgacgtactacataaatattcatacggttcgttcctgctccgagcactccgcgaagtccggctgttccgaatttcagtgctaccgcaaaacgttccttgatctcatcatcgttaccctcaatttttgacaattccggcttcagatctgcatcttcaagatctgccgcaagccagcgtttgtattcttcctgatacattttttatcactcctacttatttcttttccgggttttttgtatattttcacaacaaacctattaataatataccattttttatactttcaggcaataaatgtactgtaaattatgtgaaaacttttcgtcatttttctcaaaaatcagaaaaaggcggagggcacattttctgtgctgtttccgtcttttttctgaaattccaaattctttctattgatatgttttatttatctaccgacatcatattttctacgattgaacttccgacctcatataccatattggaatctttaagctgtacataacggttatcaccatttacatttccaacatagacagtacacgttttcttatcccctgaagtactatccttataagttgccgttaccgtaatccggtttgcttcatccagaccatattttgcaagatcttttacattataatctgcacactgggtaagtgagatggttccccatccgcctgccagttcggcccgctctttctttttcttataagtcgtagtcttaccgttttgtgttacctctaccttcttaaggtttccactgctgatcgatggcagtgtgtcattctccgtcagagatgacaggtcgaatacaagatccgataccagtgtacctgagatggtatacaccgcatccgaatcctcgatcattgcataataattgtctccggccgcattaccaatctgaatcgttcctttggttccgtcctttgctgtgtaggtaacagtgtaatccggactgtccagtccatagtctgatttttcatccggatcacttaacttgcggactgccgtaagtcctgtgatttcttttgccgtactcttgatcgtgctctggttcagacgtactccgtcatcctcatcgtatacccattcgccattctctttggtaaagctcatcttacttccgccgctttcataggcaaatgacttcagactctttacatctaccaggctgactttttccttgtcttcttttgccttcttctgcctgtcactgtgactgttccatgctttcagacctccgtacagtaccagcagtacagcaagcacgaccaccatgatgagcattgtctttttctgtttcatcaaagttccccttttctgtccataaatattcttaatttacgcttttcttctcttccaccagcgcatgaatccatagatcagaattacaagcggaattccgaagattgtcaggatgctgatgattcccgcatgctgcatcgtgttgttacttacttccaggctctttgccttgattgctacgttctttgtcttgtcaaagttcgctgtcaccgcgttcatgaacaggtccaggttctccagtgttgtatacgtatctgtaatctgcgaatcgatcatgctttcagaagaaatcactgtcagacggctggtctttgtcgcatcagacgagctgtctttggaagaactgctgtcggacgaatcgtcggatgtgatctgttcggttgcgactgctcccagtgtataggttccttcttcctgcttatcctctgtcacggcataagaattatcggatgtctgcataaatgccgttgttgtgatcgtatctcttgccggatctgttgtaatcagaccgtgtgcattgatcatcagtaccatctctgattccagattattggccagatcatctgttgctgtgatctcaggaaagatataatagtagttgccctggtagcttctctgcatatccgcaatgtaaccatctgcttcctgcataccatattctttcagtacttcatccaggttcggtgtctcatcctcagaatccccaagaatgataaatacctttccgccctttttcaggtaattcagaagtaatgttttctcatcatccgaaatgtcttttgatggagcatccatgaataacagatcacaatcgtcaggaattttacctgtcatcatcagatttacttcatctgtcgtcaggttattcttactgaacagtttcgtcacagaatctgaaaatgttgcttccccatgtccggttgtataatatattttctctgtctgttcacttgtaaccgaattgatcgcacttgtaaactgaccttctccgtcgaattcagatgcagaactgcttcctgtcgtatagtaggaataagaatccgaaactaaaatatcatcaaaagaaacggatttcgtttttccggtatctttacaggagattacgatcgtattcttatcgactcccgctttcgtaagtgctgccggatgcagaacaggatcgatccattttacactgattttatcggacagcgccgtatatttcttaatgaatgatttgatccttgtatctatcgaatctttttctgcatagattttaaatgttacttttttatccagtttgttcaatacctttttactggtctttgatactccgtaaatgttgttatcactgatatctatactctttacactctccggaagctgacccgcgatcagattgacaacgatcaccatgcagatcacaagtgcgatcattcccacactgtaacttccgtttttcgatgatgcactccggaatgacttcttgattttttctaacattatgcccctcctaactccaacgtctcttctgaatcatctgcatcgtcaaaaagaagaacaagacgatcagtgacaggtacaatataatcccgctcacatccagaagatggttatcggcaatattggaaaatacttctgtcagttccagtttgccaagtactgtggaaagcagactttcaaacactgttttctttacaaagtaagtaatcagtgttcctgccagtacgatcagctccagtaccccgctgatcacgacatttttcgtcatattccagactgcaagtacgaccagcgtcaacaacaccgcaactgccaatgcatttgcccatgctgccgaagggataaagttcaggatgccgctccagagataagtcagaagcaggataccgaatgcgccgattgccgcaatgatcacactttctgtcaatgaagagacaaacattccaatggaaatatatacgcatccgagtaagaagaacacaaggattgccaaatagtctaccttaatgtatgccgtcccctgcgctttaatgatcagtggaaagatcagatagatcacacacggtacagccgtgattgttaccattgcaagatattttccaagcacgatctcgaacaggctgaccggtgctgtcagtaacatctgatccgtcttattcttcttatcttctgcaaagcaacgcatcgtcaggatcggaattgctaccaggtatacgaacagaatccctgacaatacataagaaaagtacggatatccatagttcaggttatacgccaggaaatagattcccgtataagctaccaggaaagcgataaatacatatcctatcatagaatgaaaataggatcttaactctcttttatagatggctctcatcttacttctcctcctttatcattctattgcctgacccttgtgtcagctccaggaatatctcttccagtgttgtcttactctgattcagggtaagcatcggtacatctgcatgggaaaatgcaaggaataactcttctctgatatcttccccgccttttgctataatctgtgcagttgtaatgctgctcgcactggtgcggtattttacttctttgatctttcctgtccggcggataatatgatccatctcatccctgggagccttggcttccacctcgatctgacctttgccactcatcatattctccagattctcggtcgtatcactggcgaccagcttccctccggatatgatcatgatataatcacagacttcccttacttccgcaagaatgtgagaacttaagatcacggtatgtttcttcgcaagcttcctgataagttcacggatttcgatgatctgcttcgggtcaagacctactgtcggctcatccaggataatgatctccgggaatcccagaactgcctgtgcaagcccgactctctgcttataaccttttgacaggttctgaatcagccggttttctacgtctctcagctttgcaagtcttataacttcttctatctgtggctctcttttgtcttttttaattccttttaattctgcagcaaattccagatattcccgcaccgtcatttccatatataacggcgggatttccggcagatagccgatattcttcttggcctcttcaggctctttcaaaatgtcatgtccgtcgatcagcacctgtccttctgtagctcccaggtaaccggtcatgatgttcatggtcgtagattttcctgcaccgtttggtcctaagaatccatagattttaccggattctacggtgaaattcagatgatctaccgccaggtggttaccataacgtttggtaagattctttacttctatcaaatttccttcctcctgttaaactcaatctgttaacaatataagggggatgtttgaaaagtatgtggaaaaaatatgtttatttgatgaattaacgttcagtagttgaacaaaaatatcagaacagcttcccggacgcaaaaacagaaccaatatcttcccaagtggctccgctcacttcgttggaagtcgccttttgtgaaaaattggttctgttttttctgttattgaattgccttattatttttgttcaacacgattacccgcgtgttttgtgctatatccggtaattttattatagttttttatgatatatgaggaagtttcttatattaagacataaaattttccctctatagtcaattagatttctgacattatttatattccattttctctctgcttccttaaaaatccttgatatatccggctgctggtgattcctttcagcacgttggccgcgcttctttttacgtcttcttccagaataatgcctttggaaactgcttttacgatgtcatctacggtcccggaactgcccggcatgatcagatcgttacctgatgcgatggcgtgtgccggatcgccgtattttcttccggttgcgaaccagtcggtcatgacaaggccgtcgaatccccattcatttctcagaacctgtgtcagcagacggtaactgttattgacgtatttgccatttaccttattataactgctcatcacggctcctggatgtgactctttgactgcaatttcaaatcctttcagataaatttccctgagtgctctttcattaacgttagcattcgtcttattacggttgtcctcctgattattacagcagaaatgcttcaatgtaacataacagcctcgattcttctgaactccttttgtaattgctgccgcaaatttacccgtaagtaacggatcttcggaaaaatattcaaaattacgtccacataaagggttgcgatgtatattcatgcccggcgcaagccagtaggttacaccataggcttccatctcttttcccactgcatttccgacttctccggcaagttccagattccaactcgatgcaagtgaaattcccaccggaaatgccgttgtaaactgatacagaagatttttgctgtccggattaccaagcattactttctttaccggttccggaagatatttcataaaagagatattcggttctactccttttaccttacctgttatagatacagacgatatcttatgaagcctgagtcccgcaggtccatccgccataacgacattcggaattccctttgcagtcaggtttcccgtcgtcacgcctgctgctcccggtgcttcaaaaaaccgctggcctgacaatccgccacctactaccagctctgccatatctcttagagtcagagactccataattctgtccgtctcttctgaagaataaatctccatcgggccatacttgtgatctactttcccgataatttccggttcgatcagaaaactctgaatcttttccacatcatcaatgaccacatcacaggttcttccccagttctgtctgcagtcacatgtcgcatgaagaacttccttttcttcctgtctttcaatctctgtcacttttatcggtgctttacaaatatgagaatgtttttctgtaattatttccgtttccagttttagtattccacatactcttgtattcctgctggaattaccaatccgcacgacatattcacccggttccagaacggtagcagcatctttttccctgtaacttgtaaggttgcgcaaatcaaattgtaatacgacccgttcttcctctcccggtttcagatcctttgtcttggcaaatgaagttaatcgctgtgcttcttttttcagttcactatccggacagcttacatagatctgtactacttcttttccgctgtatgcttcgcctttattttttacatctacggagatctcgacggtagatttttccagcctcatacctgcaagatgcatttcgaactctgtatacgataggccatatccaaacggatatcttggtgctacatgaaatgtatcaaaataccggtatccgacatagattccttcccggtaatactcttcatccagattcccattcaaatagctgtaatcatctgccgccggatagtcccggtaatgctttgcccatgtatctgtaagtttcccggacggcgtatgctttccgcagactatatccgcaactgcctgaccgcccattgttccaagctgtcccatgaagatcaccgcattgatgttcggaatttcatgcagaaaattcaggtcaaactgccctcctacattgatcactacgatcatatgctcatattgttccgcgcaaaacgtcagatttacccgttctatctctgccaaaccgtattcgttttcgttaagcttacggtctgcgccttctcctgcctgtctggaaatcacgtagatacaggtatcggtctctgatttttttacatcttcctgtagcactgctcttccatatggatagcggtatggactgctcatcagattcataaaatctgacaaattcttcggacttagtttcttgcgaaattcttctgcgtacgcgcgttctccttcctgaaaactctgatcataatcatcaatccagtccatcgttgtaatcttaaatcccgcatgttccattccttccagaattgataccacatgtctttcattgacctctcccgaaccagttccccctttgatcgtcattttggcaccggctccatataacgcaagctttccgtgatttattttcggatttacaggaaggcatccgtcattctccagcagtacgattccctccaccgcagcctcatatgcaagcttttttccggcttcttccagcggcgttactgcatcggtcagtgcagctttatgaatgcttcttgttctcattgtaattatgccatcctttctattttccggatgatggcatatatggacgcaatgctcctgccacattactgatcggcattgtctgaagccacacttttccaggaccgtgaattactgtattaaaaattccttctccgccaaataacatatttttcacacccggtacactcttaatctccatttggcaggatgcagtcattgctgcaagatgtccggtatctactacgatttcctgatcgtcacgcagttcatattccgcaacatgaccgtcaaattccacgaataccgttccgcgtcccgttactttctgcatgacaaatccttctccgccgaataatcccgaactgaatttcttattaaagaataccgacaattccactcctgcctcacttgcaaggaatgcactcttctgaaataccatctcctgtcccggtccgatttcgaacgctttgatcgatcccgggaaacaagatgcaaatgcgatcatcccgttaccgccttctgcggtatagatattctgaaatatatgctctccggagaacatccttccgaatgctttacctattcctccgtttgtcgttgtctccatcttcatattcggtgacatccatgacattccaccgccttctgtgatcatcttttccccaccatcaagataacaaatgactaccggtaacgtttcgccctgaatttcgtatctcataaattgatacctcctgatattatttatacatctttaaattcgcttcttaaattgtattaacaatattatagcattccgggttcttttctacaattagtatttcatttgctgaggaatttatcatcgtggcttaccccggtccatgagaaagactttgtatgctgtttgttgctggatgtcacgatgcagaagttctaaggccatccgaatctgtcactgacaaaaccatccacaataagctgccagtaacaggttatataaacacacttccggtatttaattattatgacatgcgaaaacgtaggaataaaaatacaaggtacatttctgtgctgtctttaccatggttccgaatgcacagaaatgtaccttgtatttttattccggccggtgatagccgccatgatgaattaaacaccaagcgtctctacaaatttcaggaacgctttccgtccctcctccgtacacttataaacaccagcatcctccagcacatgcacaaagacttctccgacctcttttttcagaatctccatcacatttgcttccgtgatttcttcatatttggagctgaatatttccgcccagtctgcatgtttggcaattttttcgttacttctgatatcttcatgatttaccagatagtctgccaggatctccagttcttctttcagtctggatggaaggactgccagtcccattacttcgatcaggccgatgttttctttcttgatgtgatgatactcagcatgcgggtgatatacccccagtggatgttcttctgtcgtaatattattacgcaaggtaagatccagttcgaacatgccgtcccgcattcttgcgatcggagtgatcgtattgtgtggctctccatctgtattcgcatagatgaatgcatcttcatctgtatagtttcgccagcatctgaggatatgatctgccagatctatcaggcgtttctcatctttgtgacggattcggatgacagataacggccattttacgattccggcctcaacatcttcatatcccgggattgtaattttaatctcgatcggcgcttttgccattgcaaatgtatagtgtcccccctggaaatgatcgtgacttaagatagaaccgccaacgattgggagatctgcattagatcccaggaaataatgtggaaataattttacgaaatcaaataatttctcaaatgctttcttatcaatcttcatcgggatatgctgtccgttaaatacgatgcaatgctcgttatagtacacatatggtgaatactggaacccccattttccacctgcaatctcgattggtataatcctgtggttttctcttgccggatggtcaagacgtcctgcatatccttcattttccatacaaagcagacatttcggatatgcggtattctttgcatttcttgctgcagcgatcgcctttggatccttctccggcttggacagattaattgtgatgtcaatcttaccatatggggaatctactttccacttcatgtcctttttcacacggtatctgcggatataattgctgtcctgacttaatttgtagaaatattctgtcgcagcttccggagattcttcatatttttccgcaaatgtcttctgtacctgagccggtcttggtaccagacaattcatgatcttcgtatcgaaaagatcacggaatccgatactgtcttcaatgattcctctttttaccgcctcatccagtaatccttccagaactgcttccagctcgatggaactgctgtcgatttctacatcttcatatgaatcttcctggaataattctaacaataaatttgttgtgtaaattctctcacattccggtgtcagtccggtctgaataccatattctaccagtttcttaatattttcatacaacatattctgatccttccgttcttttttctattctgtgaatttatacaatctttgctccgtcaccgatatctactacatagaattctgcttcatgtccgactttttctttatatgtctttccaatctcttcgataaatctgtccactgttgcatcttcaacaatgctgaccgtacatccgccgaatccgcctccggtgatacgcgaaccaataactcccggcatagcctgcgccagatccactaagatgtcgatctcttcgcaggatacttcataatcatgacgaagtgactcatgggatgcattcataagttgtccgaataatttcacatcattgttacggagtgcttctaccgcacggattgtccgctggttttcatataccgcatgttttgcacgtttctgtctgaccggatctttgatcgcatccttgtactgttcgaatccgtcctctgtaagatctccaagtgtctttatatctgtaaccttctgaagttcctttaatgcagtctcacattcatttcttctgtcattgtaagcagaatcaaccagactgtgctttaccttactgttgatgatcacgatcttcgcattttcaagaacgaccggtgcatattcgtattttaatgtattggtatccaggaaaattgcatgatctttcttacccatcgcacttgcgaactgatccataattccacagttgcatccattgaaattattctccgaatattgtccgatcaatgcaagatcgatcatggagagagcttcaaattcaaatgtatcttttaacatcagtcctgtcagcacttccagtgatgcggaagaagaaagtccggaaccattcggaatatttccatagatcaggatatccattccatgtgtcagttcataccctctcttttcgaatgcccacattactcccttcggataattcgtccatccggcatttttactcggaatcaattcatcgagacttgtctcaatgattccaagcttttcaaagttcaaagagaagaaacctaattttctgtcttctctgttccttaccactgcccatgttcccattgtcagtgcacatgggaatacatgacctccgttataatctgtatgttctccgatcaggtttactcgtcccggtgcaaaataagtacggatttccccgccttctccgtataattcctgaaattttgcgatcaattgctctttctgcattccattacctccatttttaattcatttttatcattttttctttcatcccttaagtttcaggccttctttaacatccacttacatacttttttgtagttgactgtcttctgttattgctataatataatcataatgagatatgcaaattctcacaataagaatattggcatattttataagaatattgagattttatttgtttttgacttttatatacggaggatgatatgaaaggtattcagattcttacagaaaaaaacaaaaaagaagtaaaagaacacggaagttacactttccccgttcaggtatccccagaggcaatacagtcttatgaacagcattccttcatgtggcactggcatccggagatcgaacttacatggttcgtatccggacagatggaatacgtcgtcaatgaccagcgttatattatctcagaaggcgaagggatattctgcaacagtaatgctttacatgccggatatatgattgatgaccaggactgtaattatatctctgtcacatttcatcccaaattcatctatggctacgagaacagtatcctgcagaccaaatatgtcgattttatcacttccaacgaattctggtcttcacttgtattaaaaccggaaattccatggcaaaatgaaattatcgaatacataaaagaaatatatacattaacctgccaggttcaatcttcttccgatgccttcattcccggatatgaaggcatagcggaacagccggaacttcctgactatgaattccgtattcatctcctgctctgtgagatctggcaccggctttatctgcattatgtccagattgcccaggatacaccacagccacagaagcatctgcaacgtttgaaagacattctttcttatattcaagaacatgcctcggaagaacttggtctcgaagatattgcctctcacgctggactgtgcaaaagtgaatgctgccgctttttcaaaaagtatatgcggatgaccatcttcgactacctgctgtctacacggattcagaacagtattccacttcttatggacggggagaatattactacgattgccggacttgtaggattttcctcaccggcatattatggccagattttcaagcgttacatgggcatgtcacccagtcagtataaaaagaatgccgcccagtcaccttccggtgactaagcggcatcttttatacatttttgccctctctgtcaaagtattctttcacaagtctgaccacaactcctgacagcaggaagactgctatcaggttcgggataaccatcagaccattaaatgtctctgcaatattccacatcagtcccagttccatagttgcgccgacaatcgctaccagtgcatacaatatcataaatggtctgtttgcgcgggtaccaagcaggaactccacacaacgtgttccataaagtccccatccaatgatcgtagaaaatgcaaagcagcacattgcaatggccgtaaatatcgatacccagcttccgtaagtggaagtaaatccaagaatcgtaagttctgcaccggccgcatctccatatccaaccggtacgccgctgcacagaatgacaagtgccgtcagtgtacagatcacaattgtatctacaaagacttcgaatattccaaagaatccctgctttacaggctttcttgtatccgcacatgcatgagcaatcgaaccagtaccaagtcctgcttcatttgaaaagattcccctggatacaccttttttcatactcatgaagaaagatcctactgcaccgccggtcacagatgcgggtgaaaaggcacctttaaaaatagaagcgaatactgtcgggatatttctgtaattcaagatcacaactccgattgcaagaataatataaatgaccgccataaacggaaccagcttttccgctacctgcccgattcgtttgattcctccaagaaggatcagcccgatcaatactgccagaataattccaatcaccagattcagagtactcacattctgttcactgatcacaccataattatacagagctgaatcaattgctgtcgtgatggtattgacctgtgttgcattccccgttccgaataccgtcagtacaccaaatgccgcgaacagataggccagccagtgccattgcttcttcagtccattttttatgtagtacataggtcctccgaccagatcgccttccgcgtttttctcccggaaatgtaccgcaagcgttacttctgaaaactttgtacacattccaagaagtgctgatatccacatccagaagactgcacccgggcctccgatcgcgattgctcctgccacgcctgcaatattaccggttccgacggtcgcagccagtgccgtacatactgcctggaatggtgtcagtgctccgtctgaagcttctctttttttcaacatccggccgattgttactttcatcgcatatgggaatttacggatctgaagaaatccggttctgatgcttaataaaagccctactcctacgatgcagatcatggccggtactccccagatgaagttatttaccacattgttgattgattcgattgttgccaacattacttctagtcctttcctatttataaatcatatttttgattttgtatcgcgttaccgcattatcacattgaatttcaactgtagcagtatagcacgattttatataaaagtacaggatttctttttctttatcaaaagattacccgaaatttcatacacgtacttcctttcttttctaatattcttttctagtatttttacaactggtatggtatattttttcataactggctctttatctcatgccactactattgtacagtaatggcaattacgaaaggaaagagggttttggttatgaattccaatctgaaaaaaataattatgacagcattattcgctgcgttagcctgtgttgctacaatgtccatccgtattccaacaccgggaaccggcggatacatccatcctggtgatgcaatcgtaatcctcgcaggtatcatccttggtcctgtatatggtatgcttgccggtggtatcggttctgcactgtctgacctgatcggtggatattttgtatacgttccgattacactggtgatcaaggggcttgtcgcactggtatccggactgatttaccagaagatatgccgttacggtaagaaccgttacgtcgcagttatccttggaggtattacagatatcgtattcgtcgccggtggatattttatctgcgagttcttcctgtatggaagcggtgctgctgcaagtatccctgctaatattatccagggagtcggcggacttattatctctgctgtattatatccggtactgattgcaatcccggatgtacgccaggcagcatacgagacgaagaattaaattcacttacatactttgccacctataggacttgccattggcatcttctttcgaacgcatggcgaaaaaaaggataagttctttctctcttcatgaaagaacttatcctttttccacatctttttactttttcactttacttatccactttttctgcgttactttttccacaggaacatccgatcacaaatgtaaggaacagtattgccacgatcatccatccgaccagtaccttcgttcccatcggctggaacttatcatagtatcccttcaggtaaatgatgatgatcagaagcggtaatccataagacatatatcccttgattcctgacgggaacttccatccttctccctggttgatctcttcgaggaaatggttccatccccagccattcttctttgtacagaacaatacatatcccagacttccaagtggaagcaggttattcgatacgatgaaatcttccagatccatgatcgttgagccttctccaagcggagtaaatccggctaacacattgaatcccattacgcatggcatacttaaaataataatcaggatcagacttaccagtgtactcttctttcttgaccatccgaataaatccatatcaaaagaaataatattttcaaataccgcaaccagtgtcgtaaatgcagcaaagcttaagaacaggaagaataatcctccccatacacgtccgcctgctacctgtgcgaagatattcgggatcgtgataaatataaggctcgggcctgctcccggttcaattccgtatgcaaagcatgcagggataataatgaaacctgccatcagcgctacgatcgtatcaagcacggtaatattcacagcctctccgaataatctctggtctttttccatataacttccaaagatcagcatagctccgataccgattgataatgtaaagaatgcctggctcatagccccgaaaattacatttccgattccaatctctgccatctgtttgaaatcagggatcaggtaaaaacgaattcctgctccggcacctttcatcatcacagaatggattgcaagtacgatcatgatcaaaagcagtgctgtcatcatgaacttggaaactttttcgatacctttctggattccaaacgcacatacaccgaatccaatgatagatatcagaatcgtccagaatgccataagcggcatatttcctagcatatcactgaatcctgcagatacagtcttcatatccgcacccacaaaatctcctctgaagcttctgacgcaataatacagcatccatccaccaactgtggtatagaacatcatcaggaaatagcatccgataacaccgatccatttcgtaatatgccactttgttccttttggttccagtgtctcatatgcagcggcaacactgtgtctgctggcacgtccgacaccaaattcacagaccataaccgggattcccatgatcagaaggaacaccagatagattaaaatgaatgcagccccgccgaactgtccacacatgtacgggaacttccacacatttccaataccaacggcacatcctgcagatacaaggatgaagcccagtcttgatccaaatgtctctctcttcattccataaacctctctttactttttaagtcaagcattttttattatatcgtattttgtctaccaaacgcaaggactgtcattatggaattttaagtttaaaaaagatcaagaaaaggaccaggaaatgtaccctactcatctccttgtcctttctttctctttttatatgatttttactattatctgctcatggagttttataaagctttcatctggtatgagctgccccacattccagatacttatgccgtacaggcattctgaagaatctcatttaaagcatttccgctgcttgtgtggcatcttacgatttgtgcattacatttttccgcttctgttactgcacagtgtaccatcttatgagatactgtattggtaaataagattaacagatctggtcttccgatcttctcacttaagtttcccgacatctgtgtgaatacttttgctttgcatttgtactctttacagatctttttatactgatgaaccattctgtcatgtccgcctacgattactacactcatgtactgcctccttttatgtaagtatattagttagcctcatctaactaatatgatacacttttttttcgaaaatggaagaggatgtattgagaacttttctcaatacatcctctcttccattaaacacacggagaacaaaatctacagaacctgccactggcagcttctttcgaacgcatggtgataaataaaaaccggaaccactcacctgtcagtaattctacacgtcccttacagtcgtctacaactttaaagaattcctgcgcatttgtaattttattaattttcatagctggtctccttttacaatgtctggtcaaattctacatatttcatatcttgcatcctcctgctttttccttttcgctttcgcgtgctttatcgtttatttgtgtgctttttacgtgtttcatttgttgactgtatattagcacgcagcatttgaatacatgagggaattttggggattcattttctaattagatttattagcttgacctctcggtccatgagaaaagacttggtgttatgattagctgaggatgataaattcaacagtggaatgttgactttgtgataccgaaagtttcatgttttaacacttagtcattaagatatacgaaagcacaaatataatatattttccttattcattctataaactttgtattgattttgggatttcttattgataaaatagatttaggcttctgcctaaggtgctacttcacttttgacgtgaatggcggttcgctttgtgcggagagtatacaatagctccgattacatacatatctctttcagagaaatctacgaaaggagacttattgcctatgctgaccataactgacctgatcgcagtaatttcgctgtgtgcgactttttatagtcttgggtatgtgcgtggaaagcatgactcaaagacacaaaaataaccgcccatcgtcctgcaaagatctgaggcggttatttttataacaactcattttttaatcaagcgaaccgtcatatcggtagcaccttttatattcttatattaacattactattttcccctgtcaaacattatttgcttccgctttctttctgctccacataatccaagatcatcttcacagctccgtccacaccggtctttaacacatttacaaccatgtcatagtgcttcggatcatcacgtttcatgcctgtgaagcgctgataatattcatttctctggatatcacgcagtttcagttcatttaatgtctgacctttataatattcttttccttctttttcacgatattcgtcatctgcatatacgaagaaggaataactgtgcggctgaccgcccagtacgaagttggcacagcgtccgaggaatacgcccggagcctgttttgccagtgcctggatgatcttggtctgttcttcgaacatccgcatgtcggtcacatcttctgcaactcctgctgatcggatggaagccgctgtttttcttggcatttccatgggagtttctcgtactgaattcacattcaataccggaatttttttctggggattcttctatgcgctgattacaacggcaatcggctatatcttctattatgaaggtctgaagcacatcacggaaagcagtaaagttccggtcattgcttccgtggaagtcattgttgccagtttgattggagttgtatggtaccgggaacatcttggattcatcagtttccttggtattgtggctgtacttctttttattatattgatgaatcagaaagcaaataactctttgcaaacagagaatgtggctgctgaatctttatagccttattatattataagaaaaagccttgctgtctcgtcccacacaaaacagcaaagctttttcttactctatctctttcttctcctgcaatacattttctcccatatatgtatcacattcttttttctcagtcactgcctgatacagccagtttcctccatactcacaggcaagtcctaagaatgctccaatcaccagcgatatcgccagcacactccagttcccatccgctgcgaatgttgtaaaacatcccatgaatgttcccgggcagaaatcaaaccactcagattttgcaatgatacacatcacaaatgtaatgatcccgcaccagatcccaaggttgccgaacaccggactaaacttactcagtgtaatgatcgtcattccacataagacacctgcaagatttgtaacaacggtctttttcaccccgctcatgccatgtttgccacaggcaaagtaggtagtgcatcctgcaaatccggcccagccgatcagtccgacgattcctgcgagataagaccagataccacagaggactgctgttacaatgcttaatgcacacaaagaactcatattttagtatcctgcaccgttatctgtatttttcatgatcttcaccagacggcttgttccaagtctgtctgctccaaggctcatgaatttctcagcgtcgtcgaatgagctgattccacccgctgcttttaccttcacaccttctccaacatgatcatgcatcagttttacatcttcaaattaatcaatttaatatctcacgcggtaacagaatgaaatccactactgtacagaaaatagcgataagcattgaaaatccactgctttttcaaatttttcacggctatttttataccccttacgtgtaaccggaaagttataatggaagacttgattttccgatacttctatactcttccggcatcaccaaggttacgctcccgctatttcattcttcaggcattcgatacacacggaataaaggttggaaactcgttccagtccgggtagccggtctgatgaactaaatagcagctatcacatctgtcacaagtttttcaaaatctttcgccacgcggtctgccgtctcctggacttcggcatgattcagttttgcatcactgacacctgccgccatattcgtaatgcaggagattccgcatacttccattcccatgtgtcttgctgccatggcttcgcaggcggtactcataccgactgcatctgcgccccagcttctgaccatgcggatctctgccggtgtctcatagtttggcccggtcagctgcacgtatacgccttcctgaagtggtattccacagtctttggcacttttacggatgatatcctgcagttttttactgtatacttcactcatatccgggaatctggttccgagttcttctatattcggtccgatcagcggacttggtactgctgtcgtgatgtggtctgtgatcagcataaagtcacccggtctgaatgatggattgactccgcctgcagcattagtcagaagaatcttctttgctcccatcatccccatcagtctggtcgggagtacaacatcctgcatggagtatccttcataataatgcactcttccctgcatcagtacgaccgggacatctttcacatatccaaacacaaactgtcctttgtgtccttgaacggtcgataccgggaatccttcaatctctgtatattttacaatcttttctatcttgatcttctcggcataatctccgagacctgagcctaagatgactgctttttctggtttgaaatctgtcttttctcttatgctttttaaacatttttccagttttttatacatacttcaacatcctttctttcaccgcatcatccgcaaatgccacatccactgcattcctcatcatcagatgaatctcctcatctgtgattccgtaagtcttctggataaattccagttctttggtcagggtcgtattgctgactgtacggttatcggtattcaccgttacctttaatctggcattcaggaactctcgcatcggataatcttttgtacttcccactgccttggtctgcagattactgatcggacacatctcaataccgataccttttttctgcaattctttctgcacatctgcatgtcccctcattgcgattccatgtcctattcttccagctccggcttccacagaatcaaggatattctgtacgtttccgcattcaccggcatgtaaggtaaatggcatgccaagtgctttcgtctttttgaacagttccatgaattctgacatcggatacaggctttccgccccggcaagatctgccgcacacacgccgtgtcccagatattctctggcagtccgcagcatacgtgcattttcttcttcactgtgatggcgcatcgcacacgtgatcactccgtactctacgccaaaatcgcgttttcctttttccaatcctgcaagcagggcttcgatcactttattgcagttcatgtccggagtctcggacagaagcggagcaaaacgaatctctgcatagcatacattttcctgtttcatactttttaatacatcataaccggcttctttcagtcctgtctcatccataatgcatttgcccggaaggtcgaatttttccagatattcattcagacttctgcagtcttcggatacactgagttcactttgtgatactttccgccccagcctcttttctataaatccatggctcaaagatccatccagatgacagtgcagttctactttgggcagtgctgttaattcttttattgtcatagttttctccttatttttctttcagatttccaggtccgaagcccaacggcaataactccttcaacgtatagatatcataatgttctacatccgttgcaagaatgatctgaaattcttccggatcacagaattccatcatcacctgtctgcacactccacacggcggtgcatattctgtcagaactccgtcttttcctcctacgatacagattgcatcgaattccttcacgccttcacttactgccttgaaaaatgctgttctttctgcacagtttgtcggtgtgtatgccgcattttcaatattacatccggtataaaccgttccattttttgccagcagtgctgccccgaccttgaagccggagtacggtgtataagaatatttcaactgttctatcgccgtctcaatcaactgacttgtatgatatgttttgctgttttctgtcttccccatcttgtttccccgcttttatattcgtattccatttctggtaatcagtattatacatgattttccgaatgattctacttatttttttcattatcctgccggatcagatttcggactgccccgaccgctgtccggactgccatatcagtatcatgtaccaccggattttccagtccgagtttctctctttcctgatttgccataacaagaaagcatgcacctgctctgacacgtaatttaccggccacgatgaacagtgccgctgattccatctcggaagccagacatcccatcttcttccaggcctcccatttgttcagcaactcatagccgacaggcattgcttccggttcatgctgtccgtagaatgcatcctttgactgtaccactcctgtatgccaggtgcagccatcttcttttgcagcttgcaccagtgcattcgttacttccagactggcaactgccggatattcgatcggtgcatattctttacttgtcccttccatgcggatcgaaccggttgcgatcacaatatcaccgctttttacttccggctgcattccaccgcaggttccgatccggacaaatgtatctgctccgcagcgtaccagttcttccattgcaattgctgccgacggtcctccgattcctgtcgatgtcacactgactttctcaccatccagcattcccgtataagtcgtaaactcccggttacttgcaaccagaaccggattttccagatattccgctatcttttcacatcttcccgggtcccccggcataatcacataacgtccgacttcacctttggcaacctgaatatgatactgtctgcttatatcttctgaataatttttcataccgatccttcctttcgagccagtggggacggggtttcccggccttttttctgtcccctctggtctttaatcttacctttattttatcacaattcaggccaaaataattttattttctgactttttcaaaatagctttcaaataaaataggtgctccgaacgaatcgtgcgaaccatatatgtatacacggtcaccaaatatatgaggttccccatcaggtatgtactcccacccgggtaaatatggattaaacgcctgttgtttcattcttccaatctccttccatcatccatttttcaacattctaacacagtatccatcccctggcacttttgattcacaaactgtatattttaattcatatacaggattttccactatcagcttcttccgaatatataacgcaaaaaggcggtgcccagaatctcttctgatcaccgcccaaaggctatatatgtatgtcggatttttcaattataacagattagcaaagagcctttccaagtgcctggcatgccacaaccgcatcatcatccggtgcttcatttgcaagtacactatcacatgcaagaacagctccatcagccttgcatgtctcttcccatgttctcatccattctccgtctccccatccataagatccgaagagtgcgatcttcttgcctccaagttttccttcacagtcagagaacattggctcgaattcgctgtcttccagttcttctgctcccatagccgggcagccgaatgccactgcatcgtaagcgtccatcttgtctgcgccaaattctgaagccgttaatacatcaacttctgctcctgccgcctttgctccttctgctacttcgttggccattgcctctgtgttacctgttccgctccaatatactactgcaattttactcattgtttctacctctttcattgataaatttatatgtcaggcagctaccgtaagctgcaaaacacttcttccctgctgccagagacgtacatagacatctctgcattttttatattttgcaaatgttttccggcatgcacactcatcacaatataccttccagcatcctgcgcatttgaaattgcgtccctgattcacaatgaatccgatcacgtcaccaagcggataatccagaaaaattccgatttcatgtggaaattcattattttcccctattcttgactttaaccggctcaatgcatatttgatctctgtgctttcatagccgtatttcttcaggaactttgctactcccggccggttcagactgacctcgagctgtttcttccgatagacatagaccagtacacgtttatcctgtctctgtaatatatagagacggattcctttttctttcatgcactgattccagaactcaatctgatcttccacgtctgtatcatctgcaaatgtcatattaaataaatttgctgatttcatagatgccagtgttgccgaacaatgttccaccagacatttttcaatcagatatctgtccatcatcttagtacctcctaacagccgttagttatgtctaacattctatatttgaatactatatcattcttcccttgctgtcaagaattatgtataaaaaaagaagcttaatgacataaatcctcattaaacttctcagattgtaaatatttgtagcaaaaccgtctcatatgtataatattccaaatacaactcttccttataatgcttctaacgctgtattagatccaaccaaaatcaaaaccatatcttttcgcaatacttctaaaggatccgggttgacttctacatgcgccccacttttaattcctacgacattcacttcatagttccggcgcacatccagttctttcaaagtttttccactccatttagccggcattggagtttccactatactataagccggagatagtgcaatccaatctgtaaaactggctgacataagattctttgccagacggactcccatttctttctccggaaaaatgatggtatccacaccgattttctttaatacagttgcatgacggttattttttgcttttgcgattacgttcggtactccaatttccttacactcaagtgctgccataatacttgcttccagactttctgcttcagcaatcacaacagcgtccagatttcttgttccaagagatctgataaattctggatctccaatatctgcctgcatcgcatatgatacagaatcagcaattccatttacccgctccatatctttatctacagcaactacctcacatccaagtttttgtaattctaatgcaatgctttctccaaaacttcccagaccaaatactgcaaattgtttcttcataatcttttcctccttgttacccaatcataatcttttccgttggaagtgtccgcatcttttcttttaagttcacctttcctgcaaataataatgcaatggtcataggcccgacacgtcctatatacatcattatcatcagcacaatcttgcttcccgtccgcaagtgtgttgtcagatcctgcgagagtccaactgtcgccattgcagatgcggtctcatacatgattctctgaaatgaaattgtatctggttcaatgacagcaacaaatgttgttcctgttatgtatatagctaatgccaacataattgtaacaaatgctacatggaagtttttttcatccacttttctccggaaacattcaatatcatgccctccccgaagcattgtatgaaatgcgagaaataaaagtgcaaatgtcgtcgtcttcagaccacctgcagttcctcccggagaaccgcctataaacatcaaaataatatttaaaaaaccagtttcttcgtacatcccagattgctgaaatgtactaaacccagccgttcttgttgtcacagcctgaaatgcggaaaccatcaatttctgtccggtattaagatgccctatcgttgccggattatgatactccagtgcaaagttcaaaactgtccctgctatcaataagaatcccgttgtaatgatcgctatttttgaatgtaacttaagtctggtaaaccagcattttccgggaatttcccgatgccagatcttctttccgttatcaatcacatcataccacacggtaaaaccaattccgccaaggataatcaacagcattgttataatattaatcaaaggatctgttgcgtatcttgccagactgtcatctccaaggatgtcaattcctgcgttgcaaaatgcagaaattgaatgaaaaattccataccagattccttttgcaaccccatagtcccgaataaattgtatggcgtaaaaaacggccccaattccttctactactactgtcccaatcaaaattttacgtaccagacctaccagaccaccgagagaattcatattataagcttcttgaataacaactctctcttttaccgtaatctttcttttcagaagcataaaaaatgcggtaatacatgcaatcacgcccaatcctccaatctgaattaaaatcagcaaaattacttttcctgtaattgtaaattggtatttgggaacaattgtaaccaatcccgtcacacataccgatgatgttgatgtaaaaagcgcatccagaaaactgattgatttttcgttagataccggcaaccataaaagcaccgctccaagaaaaattacacttagaaaacctactgccagaattttcatggtattccatctgatgttttgttttcctgttttcttcatttatatttttcctcttttctgtcttgttcttccaaaattgactatcttttaatctacacttgcgcttcgcaaaagtcaacagttattcttccttcgtacagagaacttgccaccggcaacttctcttgcatactttaatcgggtaggaggtcaataattattcccactactagagcggattagggactttcacccgttagaaacgtgcgccgcaaggcgcacgtattaaaatgaacagggacgacttttgtcatccctgttcatttctttatccattattttttagatattttttcatattgtatctttactcatcgagcagattctgcatacttctaagtccaatgatcagagtggatgtattatgaagtaatgcggatgttgtcggcatgatgatacctgctacaccaagtgcgatcagtcctgcattgaatcctacaattgaatgataattgtggctgattctcttgatcagaccgttactgatcttctttaatgtaaccagttcttttaaattgtctgcgccaactgtaatatcagcaatttctcttgcaatctctgctccatcgctgattgcgattcctacattggctgcggaaagtgccggtgaatcgttgataccgtcaccaatcatgataactttacgtccggctgctttttctctttcacagaattctgccttatcttccggtaatacctccgcataatattcatctacaccaacacgctttgcaatagcctttgccgtacgttcactgtcacctgtcatcatgacaattttgctaagtccggcctttcgcagttcacgaatcacttctactgcttcttcacgcagtggatcttcgatacagatcacggctgcaagttttccttcaattgccatataaagatgtgaatattcttcgggcagattctcaaatttttcttccatgccttccggtattactactttttcatcttcaaatacaaagtgataacttccgattacggctttctttccttcaatctgtgttgagatgccgtgagcaacaatatactcaacttttgaatgcatttcttcgtgatccaaatgttttgtctttgccgcgcttaccactgcttttgccattgagtgagggaaatgttcctccaggcatgcagcaatacggagcagttcatcctcactcattccgttaaatgataccacttctgctaccgtcggttttgcctttgtcagtgtaccggtcttgtcaaatacgatcgtatctgcttcggcaaccgcttccagatattttccaccttttacagtaatcttgtacatacctgcttcacggattgcagaaagtacggagattggcatagcgagctttaatgcacatgaaaagtctaccatcagaatcgacagtgcctttgttgcatttcttgtaagcagataagtaagggccgtaccgccaagcgaatacggaactagtttatctgcaagatgctctgccctgctttccagtccggattttaatttctcggattcttcgatcattgctgcaatcttctcataacggctggaaccgccgactgctttaacatcgactgtcacttctccttcttctacaacagttccggcataaacataatttcctgtagttcttcttaccggaacagattctcctgtcagtgaagcctgattgatcatagcttctccatccacaacctctccgtcaaacgggatgacatttcccatatgtacgacaacctggtctccggatttgatctgattagaagaaaccagaaccgcctgatctccggtctttaaccatacttttcctacatttaatgacatggttcttgccaggtcatctacagactttttatgtgtccactcttctaagagttcaccgattccaagcaggaacatgatcgaacctgccgtactgaaatcacttctgaagattgatactccgattgctgttgcatccagtaccggaacttcaatccttctttccatcagggtcttgatgcccttccagatatattttgccgacatgatcgttgtatatgctgccgagatcggatatggcagtaagaattttcttccataatggaacagaatcttatccaccagtttctcctgatactctgcattcattgctcttccggatgtctctaacaggccattcggcacttctacttcctcataacggaatctgcggagtccttcgatgattgtttctctgtttcccttataatgaatcgttgcgtccgccgttctgtcatagacatctgcgcggaatacgccgtctatattctgcagataaaagagaagaatgtccgcctgttcatgagtcatgcgtttctgctccatgtggatacggattcttcctcttatctcatgcttaatcttaaatttcactcttgtcacctcttgctagtcttacaaaagcacctgcagatgttccgcaggtgcctgtatctatgtattttcggcaacttttctttatcttcagtgccggatttttattcttctgttgcttcagcagtatcttctgctgtctcttctgtctcgcaaaaatcatctacaacttctgcttctgcctctgctgctctgtcttcattgatctgctttgcttctgctaaaatatctcctgcattctcctgaacgcttgttgcagtcttcatcacacaagattttgctcttaatacggctgctgtacagtttgtatataatttctttgcatcatcacttgtcaggatcttgattcccgctgttccgaaagctactcctgccgcaaaaagtcctggttttttccaattaatgtcttttaaatttaacatatgtattccctccattgtatatttattaattcatcactacaaacattataacaaaaaggacatcccttcatttgtgtccggcagtcgtttttgtttctgcaaattataacaccaaggaatgtccttttcaaatattttcaggctattgataaattttatcaactgcatatttatgactgcactgttatgttccgtactttctgatcttctacataaccacatgctttcagtcctgcctgtatcacagcattccagttctttgcagacagatgcttgatcgtatcatcgtccagttcaaccgtacatgcattctgcaggtcacaatccggatcacatgctactttatacatatttcttcgattgatcgctccgatttcctccagcttgttgatcatccggtatacggttgctgttccgatgcttggatcgatccgagatgcgcggtaatagatttctttgcaacaggaacagttttcttccagtataatatccagaagcatcagtctctgcttggtgatcctgcatccactggcttttagtttctgtacaatcgcttcttttgccttatccacctgtcatcctcctatcgtatctactctgtaatagaagcaacctgaaatcctgctttttcaactgtttttttcaaaacatcatttgcaatctcacggtcataagacaccactgcttctttcttctgtaagtccactcttgccgaaacaccttttatctcatttaacgctttctttactgactgtacgcagtgctcacaggtcataccttcgatatgaactatcttctttccgatcaccggattcttcagttctttatcgtcagttttgatgataccggttccgccgccacagcagggactgtcacctttaaaatgcctgattgctcctctcagtgcaaatccaagaagaacgatcacgattaatacaactataatatctgccatatctctatccctctattctttgttctcctcattatccatgctgaacttttcgtctctttttttctcctgccatttcctgaaccagagaaatgcctgatagatagaagcaccgacaatgtaaaggacaatcacgatcacgaacaggtagaacatagagcctgtcgaattgcccatgactgccaactcctttatttaccatacatattttcgatcatttttttcacttcatcaggatctgaactgtagcatccaccaccgcatccactgcatccggcacagctgccgccgcatccctggatgactccatttttaaatctcttcacaattccgtataccaggtatgcgcaataccctaatattaatgctaaaataatgatatctgctaaaatggctaccatgaaaactgcctccttcaaagggaaatccggacgtaaatgagttacgtccggtccgctctacttatgcatttacagaacgtttggaataaactttctgatctttatacggatcaggtctgaataacaggaacagcatgactgctactaccacaaatgccactgctgtaccaactccaaatccgccgccagttaccaatgtaccgatctggtatacacaaagtgttacgagataagcgaatacattctggaacaggattgcaaaccagaaccattttctggactgcatctgctgtgccattgttgcaatcgctgccagacaaggtgaatctaacaggttgaatagcaggaatgagaacgctgctactgcacttgggaaccatgcctgaatagcctgagctactgttacagtatcttctgactgactctctgctacgtttgcaagtacacccattgttgaaacgattgcttcttttgctgtgaatccagaaagagaagctgctactggctgccactctccaaatccaagtggtgcaaagattggtgcgataaatccaccgattgctgcaagtaagctgtctgcactgtcgtctacaagtccgaatccgccatttgtgaatccgaatccaccaaggaaccacattactacacaagcaaggaacaggattgttccggctttgatgatgaatcctttcagtctttcccatacatggagaagaactgtcttagcctgtggaatatgatactgtggaagctccataacgaatggtgccggttttcctgagaatggttttgtcttcttcaggatgattgctgctactaatactgctacgatacctacgaagtacatgataggtgccataaatccacctgccgtgtagcttcctgttgcatagcttgtcataactccacccattaatgcgataaccggtaatttagctccgcatgggatgaatgttgctgtcatgattgtcagacgtctgtcattgtcctgctcaatggtcttagaagccataattccagggataccacaacctgatgagatcagaagtggaatgaaacttttaccagacagtccgaagtgtctgaatacacggtccataacgaatgcgatacgtaccatatatccgcagtcttccaggatagaaaggaagaggaacaggattgccatctgtggtacgaatccaagtaccgctccgataccgccgatgataccatcaactaccaatccttcgatcacgctgcttacaccggctgcttcgagtccttttgaagcgagatcctgaacagcaactacaaatgtatcatttgtccagtctgttacgattgtaccgattgttgttacggaaatgtagtaaacaacaaacataactgcgatgaagatcgggataccaagaatacggtttgtaacaattctgtcgatcttatcggatgttgttaatttgtcttttccttttttgacagttgtctcaacgatcttctggatgaatttgtaacgttcatctgttacgatactttccatatcatcgtcatgttttgtctcaagttcttttctgtctttatcaactgctgcttttgctgctgcagaaagattcatactttctacaaccttgctgtcgttctcaaggaacttcactgcataccatctcttcttgtcttcggagattgtatccgggagaacccctttcacatctgcaactgctgcttccatttctttagagaagatttctcttggaagatcaacttcttttttattagccactttgattgctgtctcaatcagcgtatccagtcctgtctgtttcagagcagaagtctcaacgatcgggcagtctaataacatagaaagtctctttgtatcgatcttgattcctctcttctccagaaggtctgtcatgttcagtgcaataaccaccggaacacctgtctcgatcagctgtgttgtaagatacaggttacgctcaatattcgttgcatctacaagatcaataataacatccggattatcgtttaagatataatcacgactgactacttcttccagtgtatatggcgaaagagaatagatacccggaaggtctgttacgatgatgtcatcgttctttctctttccttttaattttccctcttttttctctactgtaacacctggccagttaccaacatactggttggcacccgttaaggcgttaaacattgtggttttaccacagtttgggtttcccgcaagtgcgatcttgattcccattcctatttacctccttgaacgtgtaaattctaatgcgacaatatgtatctgtcagttccttcggtaagtcttattttacctggacacactgagcatcgtcttttcttactgaaagctcatagcctcttactgtaatctctacaggatctccaagtggagctacctttctgatatacagctcgcttccttttgtaatgcccatgtccataatacggcgcttgtatgcgctgtccccttcaatcttcgttacaacaactgtacttccaacttttgcatcacctaaagtcattgctgtttctcctttccttagattgttagcatctataatacagcagacaccccggtactaaaccatgatgtgccgcgccatatcctcatttactgccactctggagtctttgacatttacgatcacattgcctccgatcttcgacagtacaacaacttccgctcctgcaacaaatccaagatttgccagaaaacgtcttgtctcttcatttccaccaatacgtgagattgtgtttgtttcaccgataccggccattgtaagtggcataataacacctcgttttctttatgtatgattttttgcattttctctgcctgttttgataatgattttgataatgataaatgttttcattatctcctgcaatagttagtatatgctaacgttcgttagctgtcaaccactttatttcattttattgattattttttctcattaagatttttcttttatttgccagtaatttggaactgtgctatactaaattcaatgttaacgtatgaaggaaggaatgacttattatgagcaatgtattaaatgaatctgctgagaactaccttgaaacgattctgattttaagccagaaactgcctgtagtgcgttccgtagatattgccaatgagcttggattcaagaaatccagcgtcagtgttgccatgaagaaccttcgcgagaaggaacatattaaagtagatgagcagggatttattcatttgacactatccggcctggagattgcaaatatgatttacgaacgccacacacttttatcatcctggctgatacatctcggcgtacctgcggatgtcgctgctgccgatgcatgtaagatggagcatgtgatcagtaaagaaagtttcgaagcgattaagagacatgtatacgagaacaaagaagtgtaaatcatccgtttcgttttattttctttttatattatgagattttattttttcactgtattctaaaggagtcttgatttatgaacgaaagtattaaaaacatgatcgaacgccgcagtgtacgcggttacaaaccggacatgatcccgaaagaagatctggatctgattcttgaagcaggcacttatgccgcaaccggcatgggaatgcagtcaccggttattgttgccgttacagacaacgccacccgcgatcagctttccaaaatgaatgcggatgtcatgggaactgatacagatccgttctacggagcaccggttgtcctggttgtattagctgataagaacagaccgacacatatctatgacggaagccttgtcatgggcaatctgatgaatgctgccgcttctcttggaatcggaagctgctggatccaccgggcgaaagaagtctttgcatcggaagaaggtaaggctcttttgaaaaaatggggcgtggaaggtgattatgaaggcatcggacactgcgtgctcggatatccggccggagatgtgccgaaagcgaagcctcgtaaagagaattatgtgtatcatgtagattaaatgaataacgagaacagaaaaagaggaatcccggatcaatgtgatctttgggattccttttttcttcgagcagcgtattgtaaatctgctgtttgatacttcggtatgtatggtcttatgcgtccttccatacctcttctgcgatttctttcaccagttttaattttgcccactgctcttcttctgtcagtttgttaccaatttcacaggatgcaaatccgcactgcgggcttaaacacaatctctcaagtggaatatattttgctgcttcatagattcgtttgatcactgtttctttgtcttcaagttccggtgacttagttgtgatcagtcccagaacgactttcttatcttctgaaacctttgccagcggcgcaaatccgcccgatcttgcatcatcatactccaggaataaagcgtctacattttcctttgcaaatacatagtctgctacggaatcatatgggccgcttgtgaagaatgtagagtgatagttacctctgcagatatgtgaagtaatcaccatatcttccggttttccttctaatgcaaggttattcacttccagtaactgtgcttttactttgttcagatccagccccagtctctcatatctctgctttgcggcatctcctacaattgcgccccatgtacagtcatctaactgaaggttactgcatcccgcttcatagaactgtctgataacttcctgatatgcttttccgatgtcctgaatcaattcttcgtttgttgcataatattttcttgtattctcaaagtttgccggaacgatcatctgctggaacatctgtgccggtgccgggattgtatattttgcaacggtgttctcatcttcgaactgttttaagaatttgaatccttctacaaatggatgtgcttttgcctttacttttcctgtcaggtaagtatcttctactgctgccatctctgcattgaactgtacgccggctcctgtctgctcatgaccaacgccttcgaatccccacataaagtccagatgccagtaagttcttctgaattctccgtctgtaatgatgtggaatcccaattctttctgctttgcaactacttctgtgactgccttatcaacgattgcatcacattcttcttttgtgatctttccttcgctgtaatctgcttttgcctgttttacttcctgtggtcttaaaaagcttcccacaaaatcatatctgtatggtgtctggtatttgctcattttctatatcctcctgtgcttttcttcctgttgtttttgtctggatatagagtagcatgatttggatgatttggataatacatataacttgtgtgttgctatagctttaagctatagcaattaaagcatctataaaccatatatcgctgacgtttttacaaataccaagaattacactctttgacataaaaaaatacagtacctatatcagatactgtatcattcaatcggagtgacgtgattcgaacacgcgacctctacgtcccgaacgtagcgctctaccaagctgagccacactccgatatatgcaattttaaaaagtaaccggacacttccaaaagcatccggcgcccctgccaaggaactacggatagaggactcgaacctctactaacagagtcagagtctgctgtgctgccattacaccaatccgcatcagtgttatgttctgcattgttcagcgaacaaatactattatactgatttttagaaaaaagtcaataggtatttttgatttttttcatacatttccgacaatatgaaaaaccggatacttcttaatgaagtatccggcattgtaactacggatagaggactcgaacctctactaacagagtcagagtctgctgtgctgccattacaccaatccgcatcaatgtgacttttctctgctgttcttaagttgtccagcgaatattaattatactcggatacagagaaaagtcaataggattttttaaaaaagttattttttgtcataattttttggttctaccgttttattttcaaagtctatgaataactggaacgcatatccgtcatcactggtatcccagacttccacatactttggctgtacttcaatcagaatctctgtatcttcatggctgtatttgttataactttcccagagatgttctttgtataccttttcaaaacgtcttcccggttcttcgacaaccaggcctttattcacagcaattccttctacctgcacaccgctccagcataataattgtgattgcagtaacatcatctgctagatttcatctatattcctctatgctatatatgtaaatatttccaattgaaatattttatcatttttctcttttcctgtaccaccgataaagccccagtgccagcaccacacagcagctctccgcaatcaccggtgcccaccagatcgcttctcctccaaatactgccgtaaggaacaccagactgatcaccagtgcaaccagactccttgtaagcgagatcatcgttgcaaatccggccctttctacagaagtaaaatatccgccaaggaccacattgagtcccgcaatcaggaaagacaggataaagatacggaacacccttacggaatacttaatcaacgatgcttcactttctttcaaaaacagtcttacaatgccgcctgctcccatataacatacgacaactgctcctacggaacccacaagagccgccgtgattccatatttcaaaagctttttatatttacccggttcatttttcccataatagtagctgatcaatggctgtgatccctgtgcaatgcctgccatggacatgacaacgatcgtattcacatacgagatgatcgtataacttaccagtgcgtattctccgatgtacttcaggattgcctgattaaagaagaagataatgattccacttgagaattccgtcacgccggacgacataccattgcgaatctgacgccagatttctgacggcatcaaatggaacttcgaaaatcttatcgttcctttcggtccgaggaaatgccacagatacaagaggatcactgctgcctgcgagattcccgtagcaaacgctgccccccaaacacctttatgtaacaccatgaccaaaatataatccaggatacagttcagtacgctcccggacgttacatagattgtcgcaagttttggatagccatccgtcttgatcaacgtctcaaatgaataagagagaatatataccatggaaaatggtgcaattgttccaatatatgttttcgcataagagagaatattatcagttgctcccagaaatctggcaaacggctctagaaacactattacaagaattgtgatcagaaccgataatgtgcaaagcagcacaacattctgggtaaacacttcatttgcacgttctttttctccctgtcccagaagaatcgccacgattgtcgaatttcccaccgcaaacaggatagagatggaaaacagccccgttgtaaatggcattgagatattgacggcagttaatgccacttctgacactcctcttgccacaaatattccgtctaccatggtataaagcgagaatacccactgggcaatgatcgatgggataataaaacgtaaaaaatcactttttaaagactttccctcaagtttcattcataaaacctcatttctttttgttcttttctttcatttatagtttaaaccttggtataatactaaggtcaagtatcatattttcatatacacaggaggttttcttatgaatattttaattttaaacggaagtccacatccaaatggtacaactgcacagcttcgtgccgcattcgaagcaggtgcactatctcttccaaacagtaattatattgaagaagccgaaaaatcaggcgcctctctttcatagttccatcgcacaaaacatatgaagcagttttacaaaattaatgaaatatccaaactatacaatatcggaccagattctctccgctattatgaaaagctgggccttctggcaccaaaacgcgggaaaaataattatcggctatatactcttgatgacctgtggcgactgaacatcatccgcgatctgcgtcgtctgggattccctatggaaaagatccgggaatatatggacaaccgaagcgtagaaaatacacgtaaactactcacggaagagctcgatgccattcatcagcagattcaggaattaaatcgcctgcagaaaaacgttgaagaacggctgcagacattatccggtgccgaagaccagacattacttaaaatccgtctgcagacgttccctgaccgctattgccatacattgaatacaccttaccatacagatgaggagatggatcttctggtaaaacagttgttgaataaaaatacggagaatctttatattatcagcaaccataacattggctcattccttccgcttaaggaaatcaataacgggcagtatgaaaattattccggtgtatttatcatcgataattacggagagtattgtctcagtggcggcacttatcttacattcacctacgcaggggattaccgtcagaatgttacttatattccagaacttttaacctatgcagcccgtcacggtctggttccggatggacctcttctggagctgatctgggtagacaaccatcaatcggcagatatcagcgaacatattacagaacttcaattacgagtatatccgaaagactgatttcaaatctttctgtatgaattgtaaccgcatgtgccggacacatagcaataaaaaaacggtcagtattcgcatgcttttattttttcagcatacgaataccggccgtttttttatttcatattttttcttatgctataactttcaagatttacaccgtaaatgcttccgaattattacatcttcttaattctttcaatcgctgcaaccgtattctcatatgttccgaatgcagtcagacggaagtatccttctccgcttggtccaaatcctgatccaggagtacctactacattcgccttatcaagcaggtagtcgaagaaatcccatgaggtcatttccttaggtgtctcaagccagatgtatggtgcattgacaccgcctgatacgttgtatccggcatcttttaagccttctttgatgacttttgcattgttcatgtaataagcaacctgagcgcttaattgctcttttcctgcgtcagaatatacagcctctcctgctttctggataatgtaagatgttccgttaaactttgtaccgtgacgtcttgcccacagagaatgtaacatcacatctccggattttacatcttttggaattacagtggcactcagacgcacgcctgtaaatcctgcatttttagagaaacttctgatctcgattgcacaggttcttgctccgtcacattcatagatagaatgcggcacttctttttctgaaatatatgcctcataagctgcatcataaatgatgactgcaccgacttcatttgcataatctacccatttctgcagcagttcttttgtaatcgtagaacctgtcgggttatttgggaagcacagataaatgatatccggtgtctcttccggaatctccggtgcgaagttcgtctcttttgtacaaggcatatagatgacattactccatgttcctgtagcagcatcatatgtacctgtacgtcctgccataacatttgtatctacataaaccggatatactggatcacatacagcgatcttgctgtcctttgagaagatttcctggatattaccgcaatcttcttttgctccgtcggaaatgaagatctcatctgcattgatgtcgcatccttttgcctgataatcgttcttagccattgcacttcttaagaactcatatcccagatccggtgcatatccgtggaatgtctctgcatgtgccatctcgtcaactgctccatgaagagcttcaacgattgccggtgccagaggctgtgttacatcaccgatacttaacttaataatctcggcttccggatgtgctgcctgatattcacgctgttttcttgctactgttgagaacagatagcttcctggtaacttcaaataatcctggtttactttaaacatcttcttactcctttatctctgtaatgtctatcacgccgtcgaatacaacttttgcagggcctgtcataaatacatgattcttctcccgatcccattcgatctgcaagtctccacctaataattttaccgtaacacgcgtatctgtcaagttatttaatatactggctacggctacggcacatgctcctgtgccacatgcaagtgtctcacccgaaccgcgttcccatacacgcatctctactgtattccggtcaatgcaatgtacaaattctgtattaatacgttttgggaatctctcatgattctcgaatttcggtccgatcttttccagatccagattctttacatcatccacatagatgactgtatgtggatttcccatagatacacctgtcatatggtatacctgtccatctacttcgattggctcatcaattactttttcattttctgatataataggaatcagatctgatttcagttccggttttcccatgtctactttgacaagtaccacttttccatcttctacggtaagatccagatatttgattccgccaagtgtctctacagagatctgtgtcttatctgtaagtccgtaatcatagacatattttgccacacaccggatcccatttccacacatctcaccgcgggaaccgtctgcgttatacatctccatctcaaaatcagctacttcggacggattgatcatgatcagtccatccgatccaattccgaaatgtctgtcacttacatatctcgccaccgccggcgggttttctatcttttcttcaaaacagttcacatagacataatcattgcccagtccctgcatctttgtaaacttcatgcatttctctccttttattgtctcacatattactctgccataatgctcagtaccatctctgctgtttcaaccatattcgtcccgctgtccatgctgcttttctgaagatacctgtgtgcttcttcctccgacatattattacgtgtcatcagaagttcttttgcctttctgatcgtctcctgctgcttcggatctctgtttttcagttctttccttcgtttcttacgtctccggtccatggattgcagcatcatattcacagtattcagaagatcatatactttaatcggcgtagaaaggcctacgattccttccacatcaccactgctccatttgtcttgtgatgctaccagaagcatttcaaatgactctggtaaatattcacgaagctgtgtatacatcatatctttcatccgataaccacagaccacgatcccatcgtctacagtatctgcataatgcatggcctgcgcaccggtggtacacacaccaattacatccatgcctcctctggccagcaggtttctgatattggttgcattatctttattcgggaatacaacaataagccctgtcacttacgccacctcctgtcagatactcttttgcccgttccttttgtgcaaaatctgtattacagtaagtgcaggtatttttcaagttcccagtctgtaatctggattctgtaatcctgatactcagatgccttagcttctatatattttcttgataggtcttctcctaatatctcctggataaatgtatccttctgaaattcttttgctgcctctattaaacttcccggcaatttttcaattccgaaaatcttgcgttcttcatctgtcatctcatatacattacggtttactgccttcggcggcatcgttccttccttgattccgtctagtcctgctgccaggcataccgccagtgcaagatatgggttagccgacggatccgggttacgaagttcgactcttgtatactcccctcgtgttcccggaacacggatcagaggtgtacggttctttgcagaccatgcaatatataccggagcttcaaatccagggatcaggcgcttgtacgagttaacacttggattcgtgataaaagtcagtgccttcatgtgtttcataattccgccgataaagcaatatgcttctttgctaagtccatattcatcactggcatcctggaatacattgattccgtctctgctaatagacatgttcaggtgcataccagaaccattgatcccgaatttcggttttggcataaatgttgcatgtaacccatgacgttttgcgatcgtcttaactacaagtttaaatgtcataatattatctgcggtcgtcagcgcctcatcataacggaaatctatctcatgctgcgccggagccgcctcatgatgggaagattcaatctcaaatcccatatcttccagcgtcaacaccatatcacgtcttgcattctcaccaaggtccagaggcccgagatcaaaatatccggcactttcatgtgacagcgtggtcggcaatccgtcatcatctgtatggaacaggaagaattccagctcaggtccgacattaaattcgtatcccatctctttcgcatcttccattacttttttcaggatatatctcggatcactttcataaggcgttccatctggtttatacacatcacagatcagtctggcaacttttccctgctgcggtctccatggaaatatctcaaatgtattcagattcggatacagatacatatccgactcttctactcttgcaaaaccttctatagatgatccatcaaacatgatttcattatccagtgctttttccagctggcttgtggttatcgcgatatttttcatggttccgaaaatatccgtaaactgcagccggataaatcctacatcctcttcttctaccattctcaatatatcttctcttgtgtaattgttcattctatcgacctccactcaatacacgtctttcatatcataacatctgcattctattgttcttcactgcttcttagatgcatttacatagcatctatgatctgctgtgcaaatgcatctaagttatcttcctgatccgcttttaatgtagatttgatcgacagtttctgatcgagtaccgtcatatttttcatctcttctaactgttttacgatctgctttcctgctgttgcagcccaggttccgttatccataacagcaaccgttctgttctgtacagccagtgccttcatgtgcgccagcagattttcgatcggtggatagatgcctccgttgtatgtcgggcatgcgatcaccacatggctgacacggaagatctcggcgatcagttctgatacatctgtcttggatgcatcatagactgcaatattttttacaccttttgcaccaagctttgctgccagtgcatctgctgcctgctctgtatttccgtaaatagaaccatagataatggcaacagcctggtcttccggctcgtatttgctccacttatcgtgtttctcaataaagtaattcagattatttctccataccggtccgtgaagcgggcagatcatctgaatatccagccctgctgcttttttcagaagtgcctgtacctgcatgccatattttcctacgatattcgtgaagtatcttcttgcatcatcaatccagtccttttcgaaatcaacctcgtcgttgaacagattgccgttcaatgcgccaaatgttccgaatgcgtctgcagagaacaggatcttctccgaatcttcataagataccataacctccggccagtgtaccatcggtgccatcacaaaatgaagggtatgatttccaagttccagcgtgtcgccttcttttaccacaacctgtctgccttccagatctgcatcaaagaactggctgatcatctgcatggtttttacatttccaactacttttgtctctggatataactccagaattctctggatattggcacaatgatccggttccatatgctgtacgacaaggtaatctaatttcccgccgtttaatgcataagctacattttcaataaattgttcggatgcggatgcatctactgtatccatcagggcattcttctcatctttgatcagatatgcattataggatacccctcttggaatcgggaataaattctcgaataagtttaatcttctgtcatttgcgcccacccagatcacgtgatctgttacatttcttgtacatttcatagttcattcctcctcgtcacataatatcacattttttaccacattaacgcacaaacttttagaatttacgcattatttttaatacaatttttccagtattccgattttctttttttgtgttataatctaacaatatgaaaagaatatctgaccggctttcggagaaaggagcaacattgaaaaaaacagcaaaaaccgacaattcatctgaccctaagactttatgctataatattctttctactatctgtatcctgacactggcaacggttctggctttctcattttttcatattaccagaagcgatcctgccaatattgcacttatttatattcttgctcttattatcattgccagaattaccagtggatatgtttttggtattatttctgctttgttttgtgttatattcatcaactggtgctttacatatccttattttaaagttaattttcagatcagcggataccctgtcacatttgtatttctgctttccatttcactgatcatatccacattgacaacacagttaaagaaacaggacaaaatgattctggaaagagagcgtgcgatcaatgaggcagacaaagaacggatacgtgccaatcttctgcgggcaatctctcatgatcttcgtacaccgcttacttctattataggctcttcggattcttttatagaaaattatcagaatctgactgatccggaaaagcaaagtcttgtatcgtctattaacgaagattcacactggcttttgaatatggtcgaaaatcttctgtctgtcacaagaattcaggatgataccggaactgttaaaaaagaggacgaagtcgtagaagaagtcgtttccgaagcaatcatccgattaaaacggcggcttccggatattgaaattcacgtaagcgctccggaagatgtcctgatcattccgatggatccacttcttatcgaacaggttctaatgaatctgatggaaaatgcttttattcattccgaaagcgacaggcctatcgaccttcgtattacagaaaacccggataccgttacctttcatatcatagattatggaaagggtattgacgaacagaccatcccactgattttaaaaggcgaatatacagccccacgtacatcggatacccaccgtggcatgggaatcggtctttctatctgcaacactattgtccaggcacatggcggaaaaattgccgcacataatcatgcagatggcgctgaatttctatttacattaccaaagggggatacttaatcatgaatgacagctattctattttgatcatagaggatgaaaaaaatattctggacttcatgtccagaacattaaaggccaatggatataaaacaactaccgtcacttccgggaaggccggattgtccattatcaattcacagtgcccggatctgatccttttggaccttggacttccggacatggatggaaatgatatcatagcttctgtccgcgaatggaccagttgcccgatcatcgtcatttcagcaagaaccggagaacatgataaggtggccgctctggatcttggtgccgatgactatatcaccaagccattcggaacttcggaactgcttgccagaatccgtacttctttacgtcacagcaaccgtatggcatcaaactcgcctctttatatccgtccttacaaatgtcagggacttatacttgatttcgaaaaaagaatgctgactctggacggcgaggagatacatctgacacctgtagaatacaaaattgttgcctaccttgcgcgcaattccggaaaggttatgacctatgcttctgtaatggcaaatgtatggggaccttttaccgacaacaataatcgtattctgcgtgtaaatatggccaatatacgccgcaaaatagaacggaatccatcacagccacagtttttatttaccgaagtcggtgtcggttatcgtatgtgcgaagatgagaatgaagtgtaatttactgctctatctgccgggtacccttttatatatacgattgctaagaatgtgttaaggaaccctgtcgggtctatacattcactttaaatgtgttattataattaatgaagtggcatatcgaaaagaaaagcctcattcattattctctcaaaaaaggatgcaaattgatgcatccttttttactatctgtatttatttcctgtatttatttcgaattgatattcaaaatgaaaagtgtagataataccagtgcaaatcccagaatatctattgccgggaatgcagttcctaaaaagatcgccgccacgatcgttgccgctaccggctccacgcttgataataatcctgcatatacacttcctgcgtattttactgctgccagatacagacagaacggtaagattgttcccacgattacgattgtcaggaatcctacaatcacaatcatatccagatgtgcctcaattctccacggtcttaagaataccgccagcacgcctccgccgatcagcatcgcccatgcgcatactgactcggccggatatttcttaagaagcggtcccggaagtactccgtagaaacaggtcgtaatcgccagcagcattcccatgatcaggcctttcggtgaaatggataatgcatggatatttccctgcgttgccaccagaaagatacctgcattcattttccgattgtttttgtgcggcttattcccttgcacacattttatacatgccagatatctctgttatactcggcgatcgtacgatctgatgagaagaatcctgcttttgcaatgttcacgatcatcttctttgcccatgtcatacggtcttcgtaatctgcaaatactctttcttttgtctgaatgtaatcttttacatccagaagtgtcatgaaccagtctttctggatcagttctgcgtgaatctcaagaagtgtacgcacatcaccgattttcagcatctcagggctgataatgaagtctacccacttacggatgtctttgtcattgatatagtaatctgctgccacatagtctgattttgcatagtgctcgattacctggtcgctgctctctccgaagatatagatattctcgtccccgacaagctgatggatctctacatttgcaccgtcctctgttccaagcgttacagcaccgttcaacatgaacttcatgttacctgttccacttgcttccttagatgccagtgaaatctgctcagatacttcgcatgccgggatcagtttctctgccattgtcacattgtagttctctaccataacaacctgcaggtacggtgccacttccggatcattcttgagcagttcctgtaagcacaggattacatgaatgatgtcctttgcaataatgtaagcaggtgctgccttggcaccgaagatcattgtaatcggtctctttggtttatttccggctttgatgtccagatatttgtaaatgatatacaggacattcatctgctgtctcttatactcatggagacgtttgatctgaatatcgaagattgcgttgtcgttcagtacaactccggattctttttccagatattcttttaatgctgtcttattctgctgcttaacatccagaagctcgttcagtgcttcttcgttatcgatctgtgcaagaagtccttccagtttggaagcatctttacggaactcactgactccgtatttatccatccattctaccagtttcttatcacagtgcatcagccatcttctgaatgtgataccattggtcttattgttgaatttctccggataaatgtcatagaatggcttcaattctacatttttcaggatctctgtgtgaagtgctgcaacaccattgacactgaatccgtaatgcatatccattcttgccatgtgtacacggttccactcgtcgatgatctgcacatctttgttatcatattttgctgccactcttgctgccagttcacggatgatcggcattaagtgcggaacaaccgcctccagatagtcgatcggccatttttccagtgcttctgcaaggatcgtatggttcgtgtatgcacaagtatttgtcacgatctcgattgctttatccatagagattcctcttgctgtcaaaagacggatcagctccggaattaccatagacggatgtgtatcgttgatctggattacaacgtgtttatcaagttcttccagtgaatagcccttttcttcacattcttttaaaatgaactgtgcaccattacttaccatgaaatactgctgatagatacgaagcagttcgccctgtttgtcactgtcgtccggatagagaaacagcgtcaggttctcacggatatcattcttgtcaaatgagattccgtcgcctacgatattttcatttacagattcgatatcgaataagtgaagtttgttggttccattttcatatccggttacatcgatatcgtataattttgaatgcaggctgaaatctttgaatggtacattgaatccgattcctgtatcagtaagccagcttgtattctggatccatgggtttggagtctctttctgtttgtgattttcaaatacctgtttgaacagtccaaggtgatagttcagtccgattccgtctccttccagaccgagtgttgcaatggaatctaagaagcatgctgccagtcttccaagtccgccgttaccaagtgacggttccggttctacttcttcgatctcgcagatgtcttttccatttgctgcaagaagctctcttacttcatcgtatacgccaaggttgatcaggttgttggataacaattttccgatcaggaattctgctgatatataatatacttttctgcctttttcggaaatatttcttcctttatctgctgcagcttcttttactgtgttaagaagtgctgcgtaaatctcttcattcgatgcatctttgattgctttgccaagtgtctgctgtaacttttctgagaaattcataattaacctcctgaatgtgtgctatcgcatgattgtttttaatattgatctgaatctttgtttcatcagttttcttttgttttacactgatattataataggattatacattttatctcttgcatcatagtagtaaaaagtaatacaatactatcaaatatacaactttttgatcatcccaattacttcagaaaggacttatacacatccatgaacacacttacctatgaaaacctccatgaaactaaaaaacacgtcagcatccagtttccatacaatacctatctgtgctccatcccgctggacttcacacaggttccgcttcactggcataacgacgtggagatcattgtaataaaaaaaggctgcggcatcatttctgttgataccaagcccagagttgtaaaagccggcgacatcgtccttgtccgtccgggccagcttcactccatctcccaacatgggaaagactgtatggaatatgaaaatatcctgttccagaccagtcttttatattctgcggattccgatccccggacagttggatatttccagccatatttttcactagaatatgaacttccatggctctttgacgatacctgtttcttccatgaagaactttcttcctgtattgatgcgatcgatgatctctgcagcaaaagacctgattattacgaattatcggtaaaagggcatctgtttcatttcttttacctgttattctcttctcagggaacaccggtcactttcaaccgggataaatctctggataaggtaaaacagattgtgtcctacattgaatcacattatacagaaccgattaccgttcaaagtaccgctgattatctgggcttttccgaatctcattttatgaaattcttcaagcagcatctgcacacaacattcaccagctatctgaatggctaccggcttaccattgccgccaggcttctgctcacggaagatgacagcatcctgtccatctcggaacgcacaggattcaataacctgtcctattttaaccggctgttcaaaaaagaatatcagatgtcaccaagagcatacaggaatcgctaaataaccagtaatatagaaaagaggccgcatataagcggcccttttatgaaatcctactcaacctcttccggttccatacttctcatatgttccccgtcttttttaatctcatatttctgattatattcattcagatatgttttatattcagaactgtcagaaggatataccttcgaatcatggatatgtgtatccatattctctttgtcactgttcataagtgcaaccatcgcacttgcacagtgagctgcaatacggttaaaactgttcaggatatccgtaaatacagttccttcttccagaccacatccaccactgctcatacgttccacatgacgcatcttcagttcatcacaaagtgttgtaataaccataccaagcggtgctactctctgcgccatctctttatcattctcaaggaatgccttgcatgtaagattgatttcttcacgtactgcttccataacaacattcagttcgtcccatgcatcttctgagaactgtgtcttattctcatgcatatcactggacatatatgcaatataagaagcatgatctccgatacgttcaaagtcattgatcgtatgcagataaagtgaaacctgtcttgtctgtgctgtattcatctcatgctttgtcagcttgatcagataatcgcccaggcggctttcatatttgtcgatcaggtcttcttttctctgaaccttgtcaaacttgctctgctgatactcattcagaaggttcattgcacggttaacattcttacgaagcttcttcgccatgccactcattgctctgtgacactgtccgattgccagtgctggataatccagaagacgttcttccagaagatcgaaatccgcttcgtcttccagttcttctgcgctgtcttttaccagccagcataccagcttctcaagtttattaataaacggaaacagaatacataccgttaccagacggaacacggtgttcaacagggcaatcgataccggcgacataatattatccagaaaatcaaaatggacaaatgcattgatcgtatagaatccgatcgaccagatcaacattccgaaggtatcatttaataaatacacaagtgcggttctcttaccattcttatttgctccgatcgctgagaccagtaccggacaggatgctcctacaccgataccaagaataatcggaaatgcactggaaaatgtaaggattcctgttaccgataaagcctgcaatacaccaacggtagcagatgcgctctgcaggacagccgtaaatgcaacacctaccaggatacctgcgattggattcgagaacatcgtcagcatatcaataaatactttactctctcttaatggtgtaaccgcaccactcattgtctgcatgcctgtcatcagaattgcaaaaccaagcatgatattaccgatgttcttgtgtgtcgttcttttacagatcatccgcatgatcgtaccaattaccgccacgacagccgctatcgttgcagaagataaaatctttgcaataccattcgatccttcaatataggaaagacataagatccatccggtgatactggtaccgatattggctcccatgatgataccgatcgcctgtttcagtttcatcataccggagttaacaaaaccgatgaccataacggttgttgcggaagatgactgaatgacactggtcactcctgttccaagtgctactcctttgagcggtgtgtttgtcattttgtaaaggaatgcttccagtttattaccggcaacctgtttcagcccatctcccataagggacattccgaacagaaacaaagcaactccacttaacaatgacaataccatagaaaatatttccataattttctcctttgttgtcagcttattttacgcttacttaacattcttttaaaatattcttaaccttttcttttttattatgtcacgttaaacgtttgattacaatcgtatatttgtcagaaatcacattttttcacatcccgtagaaaaatgaatcccgtcaattcctcttttttcatcaatttatccaaaaattacgttctgattttataattcttaccttgcactcagactgagaataagctatcattttgtctatatgggtaaatgtttatacggaggaatatatttgtgagaaaaaaggaacaggaacacctgatacagaccgtctatccgggttctattgctgaagaactggaaatcgaacccggcgatgtactgttaaaaataaacggacagaaaattgaggatgtctttgattatcgttatctgatgaaagatgaatatgtcgaagtcctgatccgcaagccttccggggaagaatggcttttggaaatcgataaagagtacgacgatgaacttggagttgaattcgagaatggactgatgagtgaataccgctcctgcagtaataaatgtatgttctgcttcatcgaccagatgcctccgggcatgcgtgagactctgtattttaaggatgatgactcccgtctttcatttctgcagggaaattatatcaccatgacaaatatgaagcaggcagatattgaccgcatcatccatatgcagctcgcaccgatcaatatctctgtacagacaaccaatccagagctccgctgtaagatgctgcataaccggtttgccggagaaaagctaaaatttctgcaggatctgtatgaagcacatattgagatgaacggtcagatcgtattatgtaaaggcgtaaatgacaaagatgaattaaaacgttctattgaggatctttccagctatcttccttttatgagaagtgtatccgttgtacctgccggacttacaaaataccgtgaaggtctctatccgctggaactcttttcaaaagaagaagccggtgaagtcattgatatgattgaaagctatcagccaaaattctatgaagaatatggtctgcacttcatacaggcaagtgatgaatggtatattcttgccgaacgtgattttccggaagaagaacgctatgatggatatatccagctggaaaacggagttggcatgatgcgtcttttaaagacagaattccatgacgctctggaagctctgaagcagaatgacaactatgagacctggaaaaatgagacctgccgtacacttaccattgcaacaggcaagcttgcctacagtacccttgccggattcgcagaggagatcatgaaagcatttccatatattaagatcaatgtatttgcgatccgcaatgatttctttggcgagactgttaccgtatccggtctgatcaccggtcaggatctcaaagcccagcttctggaaaagaaagcctccggcaccgatcttggtgacacacttcttatcacatgcaatatgttaagaagcggcgaacaggtatttctggacgatatgacggtacaggaactggaagatgcattagatatgactctggtcgccgtagaaaaccagggacaggaacttatcgaagccatgctcaatcatcactatacaatgcagcgtgacaatgatacagacagctttgtatacgtaaaaggttataactcatagcacaaacgaaaacatactttcattagcaggattaaatttttcagacaacaccaacaaagaaaaaataccgcagctttttcaaaatttgaaagctgcggtatttttttccattatgccggatttacatgaatcataatatgctttgtattcggaaacttcttttctacattgtcgtgcacatcctctgcaattgcatgcgcatctttcaacgaaagtgttccatctactgcaatctctgcatcgatatacaccttgttgccgaacattctcgttcttaacagatccagtctttctactccccggctttttctgatatagtctgccagtttctcttcatattcttcactgcatgaagtatccagcatcttatccagtgcatctttgaaaatatcaaatgctactttcaggataaaaatacagataactacacttgccagcggatccagcacaggaaatccaaacattgcaccacctataccaatcagtgaaccaacggaagaaaatgcatctgatctgtgatgccatgcatctgccatgaatgctgcggaatctagaatcttcgcataatgtctggtataccagaacatcccctcttttgtaagaatcgacacgatagctgccacaagtgcgatcgttcccggtgcctgcaaatgactgtaatcaccggctatgatcgtcttcacaccactcattccaataccaatacccgttgcaagaagaatggctgcaagcaccatcgatgctacacattccaatctgtcatgaccgtatggatgttcgctgtccgccgatttcttagataattttaccccgagaaatgcaatgaatgtggcaaacacatccgataatgaatgaaccgcatcggatatcatggctcccgaatgtccgataattcctgccagcagtttgaacgctgtcagaatgacatttccaagaattcccacggttgataaatgattgatcattttctgttcatttaattgttgtttttgacttgtcataagataacctccatttttaataatgtcatgtctcctatggcacctaaggtgagactcctgttcctccgtattctatttacaagactgctttttgcaaaaaaatacacctgtggaactttctacttactgtcccacagatgtatgatatatcgtctcatctgctgccggtaatcgaccggcccggcatgcacatcatttttctcgattttattcttataaaaaatgaatgtagcctgatcagtttgtactgttatcccttatccgtattggatatattcagtgcaaagagattctatatataatattcgattttcatgaaaaagtcaactgctttttccggttttcattctctttataagctcttaagctcttcttaagatttttccgatttctttaaggaatttaacatactttagacatatttgttttttataataaattcagatagttgagagagacaaaatcaactatctccccctcataaagtagcacaccgggaatccggtgcaacactttactctcattcctttagataactataacgacaacgaacgccacgggccggaaggtttgtggcgttcgtcgtttcttttttcagcaaaatttaatgcttgtttaaaagttatatgctataataaattatcaacaaaacccttatatagcttatcattttctctcgtttcccaaaaagaatgtttcaaagaaagcggtggttactatgaaaggaaaatatctttttacaagtttcattatgatttcacttatcatgatagtctcagcctcttgcggcagttccaaaactgacaaaacctcacaggaaacaccggtaaattacaccggtgaaaatatcaatcagcttctgacctataccgttccagatggataccatatcgatacagagaattgtatagataaaaacgaagcttcatacacaattattttatcctctgatgacttagatgaagaagtatttactcttgggattatctcttataaaaagcaaggtgtagcaatcactgacgattgcgacattgatatggactacctgttaaatgtttccaaggattctgtgattaaaaagataaccttaaacgacacatttacagtagatgggcatacctgcaatgaagttacagtgtactggccatatgatccggttgaagaattcatctctccatcccagaatcctgtatcatatcttttacatgcccttggattcaaaaaggaacaaaaaacgattgcttttgaacaggcatatattcaaaatggtgattatattatcggagtaggcgtccgaagtttcaatgcagtgcaagatattgaaaatgatgtattaaaaaaagatttgtataaaatactgaattccataaaattttcaggcaacctataacaaatcatcctgaatatcttcctccagcattcgtatccccgcaacactggtcaccggcagcgagaacactatcgtacgttctttgctgtcgagaccggcctgctccatgattgctttcatgatctgattcttctctctgctcttcgttacgatcagaatgacttctttttcttccaccagtgacaccccgagatacttttttgcaagttccatcccggttccttttgcatggatcacagttccgcctccggcctttgctgaccttgccgcatccatgaccgtgtcgatatatccctgatttgcgattgctaccagaagttcataatctgtatctttcatcgaagtctcctcctctttttcaaattcctgttcatttacaagaaactgcagtgtctttcttccgcccacgctgctaagcggcacaatgaacgatacccctgtccccggtacatcgatcagcatcttcgtgatcagtccccggcgcagctttttccacgtctctcctgttacgattgcaagaaataacaacttttccgattcttccaggccgaaataatccagcacttcactctgtgccgtcccccttccgatcgtttccagaaatacaggaagtccgtactctttaaaaaatgttcggaaatcttttcgtttgtttctgttcgtgatggtcaccatcatatataccttactcataaattctcccttacaactctatgatatccgcatccccatatgcctccagcggtaataccttaacaggctgcgcgagcatctcttctttatccttcttacgctcctgatactgatacaccacacccaggatttgtatcgtgataagcggtgtcattgctaccattgctaccactccaaatgcatccgttaccacatttccgccaaccgcttcacatgctccctgtgcaaacggaagtaagaaggttgctgtcatcggtccggatgcaacaccgccggagtcaaatgcgatcgccgtaaatatcttcggcacgaataacgtcaagattagtgccagtgcataccccggtaccagaaaccacaggatcgagatacctgtcagcacacgtatcatcgccaatccaagggaaaatgcaacgccaagcgacaggctatatcccattgcttttcccggtattgctccagaggtcagctcttctacctgctccatcagcacatataccgccggctctgcctttacgataaagtaaccgatcagcataccgatcgggatgatcacccagcggtaaggaagccctgcgatcacctgtcccaaataattacctaccggcataaatcctacatttacccctgtcaggaataataccagtccaatgtatgtatacaggataccgaccaaaattttgatcagcgttttcttttttaatttcagggataccacctgaaagaatgtgaagaacagaataatcggaagcagtgagccaccgatttctttcatataatgtgggattccggactcgaataatttccataatgctacagatgtctctgcatccggtattacagtctcggaatagctgccaccctgtggatgatagataataccaagaagcaataccgccagcaccgggccgatcgaacacaacgataccagaccgaaactgtccgtctctgcgtatttatcactacgtaccgcagagaatccgattcccagtgccatgataaacggtaccgtcatcggtccggttgtcacaccacccgaatcaaatgcaatcgccagaaaatccttcgatacaaaaaaagtcaggatgaacaccaccggataaaagatcaacagcatataggacagcggttttgaaaataacatacgcaatacagcggccaccagaaaaattccgactcccacggcaaccgccagaatcagtgtcatatttgataccgaaggtacctgcccggccagcacctgcagatccggttccgatattgtgatgataaatccaagtacaaaacacaacccgatgatcaccggcagcctttttgactgtgcgatccgggttccgatcctctctcccattggtgtcatcgacatctccgcccccagtgtgaagaacatcattcccaccaccagaaggatcgctccaataataaaagccatcagaatgcccggcggcaccggtgcgatcgtaaagcttaatatcaatacgatcgcgatgatcggtaccaccgcttccaatgactcttttaatttctctgataattttgtccgatataaattcaataaatattcatgcctttctgtgttaattattctacaattttctgactattcactatattctttatattatcacagaattccaatcctatctatttttctactgttaagatcttgctaagaacgcttactctgtaaccatatccttagcaaataatgcagctcccagtgctccacaaagctgtgccttatcgctgatcaccagtgtcgttccaagcttctcttccagtgtcttcaccagtccctggttctttgacactcctccggtcatcatatagcgttcctcgccgccgacacgttttgccagtgctgctgtcttggacgcaacagccttattcagtccgtgtacgatatcatcggttgccttattctgtgcgatcagtgataccacttccgattctgcaaatacggtacacatgttggagattgtaatatcttccttatatgacagacctgcctttcccatatcgtccagactcatttccatggttcttgccatcatctccaggaatcttccggttccggctgcacatttatcattcatgacgaaattggcaacggctccattttcatccaggcggatgaccttactatcctgtcctccgatatcaataacggtacggacttccgggttcaggaaatgtgcccctcttgcatgacaggtaatctccgtaatactcttatcaccatctgaaatagccgttcttccgtatccggttgtaaccattgcatcgatgtcttctctctgaagtcccgcatccttcagtgcttcttccagtgcacgctctgctccgattgctgctcccgcacctgtcggcaggatgatccctgtcacgatattttggtctttatcaagaattactacatctgtacttgttgatccgctgtctattccggcgaaatatccttttcccatcttcagttccttcccttccagttcttccatattcatgctctctgcaaatgcttctaatcttgtcagaagctgtccgctgctctgtacggtataatccgattcgatcttcaaaagtggtacggtcacattctgtttgatctgtgcgtattcaaaactgtaaaaatcgcagaatttcacggtatgataaataatcccctttaatcccgggtcattgtataatctctttcttccactgtgatccatcatacgcatacatggaatctgtccgagaagttctttcgcataccataccatcagttcatcaaattccaattcctttggcggctctgtctcgcccaccgaacggttgttgacacaggtatcattttccaccggatacggcatactcttctgcaccatatcaaaaagttcatttcccatacgtgcacccagcacactgatatgcggctttacaatgtgttccggcttcttgaatgcctgacggaacttttcttcatcaaatgttgtgcctttatattctccatatgctttcgcaagaccttttaactgcactgctgtacgttctctgctgcactctgcatcacaatgaagcacatcgatcatatataagaaatccagttttccactgtcttccagaatatcatagacactccggatcgtatcacaacagttgaccagcaccagttcctttacctttccgctcatcacagcttccagaagagccttgccgaatccgcagatgttcggatgcgctatctgatccgcatggtcaaagccctgcggcatctcattcaggttctgacattccccgccgaacgcttctaagagttcgattggggtatatttacagacataatatgttttattcatcgtgcgattcctcctgtctgtccgtattttcatccgtttctgtattcagcatctctaagaatgccccgagtctggtagatgtctgcccttctccgccatgacttctgtcgcatccatcgccgtccaggatcagaagcgggattccctgttcttcgaatttgcgcttggcaagctgtgctgctccaagggtatgcttacatccccagtgtccgaaccaaacaacaccgtctgctcctgtctcctttgcatgacagattcctgcttcgattcttctgatcgcacttccatttaatgcatgatacaccatacgtctcgccatcgcttcataaggcttctccggatcaaaatccggctcacagacacggctcagttcacatccaacgatctgcgctttttcctgaaagcaaagttcattcttcaccgcatctgaccagaacggaatagtgtgcatccagtaaatcttctttcccttttttgccggggccttcttcacatcgttcaggagacggtccacatacgtttcctcttcttctgttcccaacagcagattatttgtcatacctgcatagagtggcgtaacaaggtctgcaggaatatatctgtccgcactttccttttcatactgtgcgaatttttccagcgtccgcttgcttcttctcagtcgttctgttaatgtctcatctgtaatctttttgcctgtgcattcttctataaagtctttcagtttacgaagttggtctgccacatactgtacattgtcttcgttctgctgcatcggcacatcgatagcaaagatcggtacatcatacatctttgccagcttcttaaatgtcagaaggtttgcatcacaggtcagattcgtgtatacaatacactttggtttcggaagtactttcttctgcgccgctccgataaatgtcttgtgataactgcaaagtgtctcggatatgcccgtattctccgcctgttgtaaaaatgctctttctgccttagatgcagaaagatagcaggaaaatccttctacattgtatggatgtaatcctgcttcctgtaaaatttcacaaggagtaaagatactgacaattgcactttcttccggacgttccagcggtcttatcatcgtatccatcataagccttgccagatactgctctgccggcatcagtcttttgtccggggcaaaccggaacttcagattctgtgccttccatccggtcttcaaaagccatcttgctctgcccggattttcattactccatttttctatatagtttccatatgtttctatgatcttcatgttctcatcctcgtcttgccctgttgtctgtttccatttttcttccttattcaagtataaaaaaacatttaacatcatactcttcttttttataaaatgcaaatatacagcagtgattttccacaaatctgctgctgcatatagatatcatcgtatcattacaatacaagtaataacacgaatccgactattccaatcattgaaaatacttttccttctgttgcccccggtgcatgatagacgatcctcacttcatgcttcccacttccgatctcacatccaagaaatgctgtatttaccttttgtatcttcgtctcttttccatcgatgtacatcttaaaatgtgtgtcatatgggatggatgtaatgaaccagccatcattctttacctgtatcgttccctgtatcacattatctttcgtcagctttttatccacctgaacttctgactgatataacgtttttgaccgttccggcagactgccaagatatgcctgtacatggcttaattgatattttcctttgccaaatgttacagaaatagtatcttctccatcctttaacggcactgcatagataaatgttttattttcattataatatacatgatcttttgcgcttagtttattacggattccgttgatccagactgccacgtccttattcggacgtgcattgtccacacggaagcttaggaaaagaatctgtctctgcccctcttgttgtgtcgtttcctgctgcacctgtcgaatggaaaatgttatcttttttatcttcttcgcatggatcttccagccatcttctttttcatggatccacgttccgacttttctttcatttccgtttttcttccctatatctgtggttctattgccggctccattttgcgctttatgattgtcggccattttcagactaacaggcgcataagctgtcattatgttctgatctgaagattccgtatgttctccaacaactgcatattccagaaatgccgtctgattatatggaaatgcaagtttgttatattctttttccgtcatcacacgatctgttgcatacatgaccggtgccgcgtcattattctgatatatgccggttttttcacatttcttaaccagagcatatcccgttacatcagaatctgatacgatatagcgtactcccatcatccggcaaaataccggattcttcgataccgactgcatcatcacattccggaacggttcttccagtccgaatgtcttctgacgaaatgtctgatattccgaattgtatgccgatgaatagattgaagtaatattctgccccgcatcccagatccggtttaaatccgctgcattttcatcgtcattgcccatctgttctgtgcggtaatatccaccatcatttttcaaagcttcttttaccgcctgttcattatgttctcctgcaacatcccggtacagtttgtgactgacataccggtccggctccatctgataaaaggtattcatcgtgaccgccagacatagcaccgacggcagtgccagcatcagaatctcttttgtctctttgcagtggctcttcactgcacaataaagcacataacatatcaggaacagaacactttctgcaagtaatgccttccatacgttttcctctattcctttagatgtaaactggtttcttgctatataaacaaataccgttgtaatgatatacggaaccattcctgcaataagagacaatttctctttcctacacttttccagataaatagcaatcagataacacaacaatggcagaaatggaatgaataccttatctctgatatacagtccgccattcaataagtaagcaaataccggaatgacaagcacgatcacacatccatatgtgagcactctctcatatactttccggtacagaagtcctgtgatcaaaacggtgatcacaagtgttgtaagtccgattccatagatgctgtaagcgaatcgttctaccgtgatctgcggaacgaaaagggtagtaagcgatgtattctgccctttacttctaccacccgccagtgcaagtaccgttggtaccaggaagaaactactcataagtactgccagaatcattggacgaacaaaacacagtccatccactaaaaagcctctgaccgtgactctgcatccttctctttgttcaaaataccggtgcagtccataaagaaccagtaccagcattccgccaatactgaaatagaaactggtcatgatcatcagaaatacactgactgtaaaaagaccgcttttttctttttcaaaataccggtccacacctataagtgccagacataagaacggcatataatctacgaacatgatctgaccgctgtactgtccgatcatcgggcccgccagcaggaacatcagcgatatgataaaagcaacgcctgtatccatctttctgcttttcagccagtaataaaaaagcagtaccgaaaccgtcagacctgttatgctgatcaccatgatgtaatctgacattttcacaaatgggagcagatatgacggcagaatcaatggactgtatagtccgtaataagcaaaatgataaatgttctgacctccgcccagattcggcgcaaattccggaaatatctttcccgttgcataaaactgctgccggaaataatccggcagcacactatgctgactgagccagtctacttttgctccaaagattccatgtcttcccacaaaccaccagcagaaaaaaaatgtaaatccggcaagtatcaggtatggaatgcatttcttatatgaagtatatttcttatacagagtgcacttcttttcctttcccataactcttcctccgcatgttctgtgataatggcatcatcataatcctctgttcttctttactggaatcctttaacaggtataccggacggttctttacttccagatatgtcttggcaagatactgtcccagaattccggtacacagaagctgtacaccgcccacaccgaacaggatacagaccagcgacggccatccggccaccgggtctccccagatcagtgtacgaactacgattgcaacgatcatcaggaatgataatccgcaaaacagaactcccatatacgatgcgatcgacaatggcaccacagaaaatcccgtaatcccctccagagaataaatgaataatttctttacattccattttgtttctccggcagctctttcgatattctcatattccagccatttcgtacggaaaccgacccagccgaagattccttttgaaaatcggttgtattcactcatctccagaaccgcatctaccatcttacggttcatcagacggtaatctctggcaccgcttacgatctctgtcttcgatatcttattgatcacattataaaattctttggataaaaatgaccggatctttggttctccctttctggttgaacgtctggttgccacactgtcatatggttcttctttcagaattctgtacatctccggcagaagtgacggcggatcctgcagatccacatccataattgccgcaaaattaccgcctgcattctgaagtcctgcataaatagccgcttcttttccaaagtttctggaaaaggaaagatactggcatcttccgtcctttctgtgtaattctttcataatcttatatgttctatcggatgatccgtcatctacaaatatcaattcgaaatcggtctgtttcttcatggtgtccataacttttttcatttcggtataatagatcggcaatgcttcttcttcattgaagcacggaatgataatactgatcttgtccataactataagcctccttacctatttcttgaagttattgtaggcttgatttcttaaagacatacgcaaataattcttaagatttcttaaaaaacttctatatttttccaaaactatgttgtgtaaaacaaggacgaaccagaaaagatattatgtccctgttcttatcatgctatatagttttaaaaaggcggattccgtgtgctgggcctggaatccgctttttctgctatattctatctttttacttcttatttcataacctgtctatagtttctcaattaaaatatgagctctatcttcgttccttcgcccagtttactgtctacatggatcttggctccgtgaagcatggctccgtgttttacgattgacagtccaaggccggttccgccggtttctttggaatggcttttatctacacgatagaaacgttcgaagatacgatccgtttcattttccggtattccgattccggtatctgtgacacagattttcttgccctgcagggtattgcctacccagacagttaactttccgccttctttgttatacttgattgcattttcacagatattgtagatcatctcatccagaatctggcggattcccacgtattctaccggctctcccgtcacctctacatgtacttttctcttcgctgcctgcggcgaaagtctggtcaggatctctcttgtcaacttataaagatctacttcttctttttccagctctacattgccctcatccagtttggataacttgataatatcttctaccagcgtgatcaggcggcttgcttcattataaatacgttctgcaaaccccgtcatatcttccggttttaccaatccatttttcatgatctccgcataacctgaaatagatgtaagcggagtctttaattcatgcgacacgtttgccgagaattcttttctcatattggcaactgcatctttttctttattctgcttatcgatactctgtaaaagtggtgttaattcttcgtacacgtcattctccaatggattctcaagatccagtctgttgatcggacggatcagtctcgttacctgccattttacaagtgcacttgcaaatgcaagcatgatcactgcgatcagtcccatcaccggaaatactttcatcgctgtccggaatgcggtatctaccgtctttgatacacgcaggatatctccattttccaatttcactgcataatagaacatctctttattcagcgtattggactctcgaatgtcctgtccgcttcctgtttttaatgcttcttttacttccggacggttcttatgattctgaaacgttacttcatcttctttggaatcatattttacatttccatctgaatcgatcagtgtaattcttgtatccttatgcaccttatccattatcttcagataagattctccggaggtatcgattgctacattgatataatccgcctcctgtctgacttcgccttccatgatatggatcgtctggcgatatacgaccagtgtagtgatcgcataggctatgatcaatgtcagcgcaatcacaaggatcatactgctctggatcttttttctcatactttgtttcatattattacctactcatacggtatccgactccccggactgtctcaatctgttcacctgcatctccgagcttctgtcttaaggttctgacatgcacatccacggttctcgtctccccgtcgaaatcataaccccagatatcctccagaagctggtctctggtaagcacaatgttcgaattcttcatcaggcgcttcagtaattcatattctttcagggtcagattcactacctctccatgaactgtcacttcatgtttctttggatctaaccggatctctccgatctcaaatgtatcttcactggatacacttcccttcgcactgcgtcttaataccgccttgatacgtgagatcagttccatcataccaaaaggtttcgtcacatagtcatcagccccggcatccagtccttttactttgtcatattctgcaccttttgccgtaaccataataacaggaatgtctttcgttttctttgatgcttttaactttctcaaaagctccattccgtcttctcccggcagcatgatatcaagcagaacaagctctggcgtctctaatgccagagcttcaaggaatgaacttccatcttcgaatccgcgtgcctgaaaccctgtactttccagggtatacaccaccagttcccgtatattaccgtcatcttctacacaaaaaatcattcctcattctccttctttatactacagatgatttgtggattcctgtaattgagaattccacccactctgcgatattcgttgcatggtctgcaatacgctccagatatttggcaaccataatcagatcgattgcttccacaccttgcagacctttattttcagcaatgaaattaatcaatgtcgtcttcacttcctcaaaaagttcatctaccacatcatcattttccattacttttcttgccagatccagatctttctctacgtaagcattgacactgtcacggaccattttgctggccgcctctgacatcttgatgatcatcggaatatcctgcgcttctgatttgtcttcagtgataataatctctgcaatatctgatgcctgatctccgatgcgctccatatcggtaatcatcttaagtgctgcggatatctgtctcaaatctcttgctaccggctgctgctgaagaagaagtcttaagcaaagtctttcaatatctgtctccgcctgatcgatctcttcatctgcaattcttactttctctgcctgttccatgcttccttcttttaatgcagtcgttgcttttccaatcgcctcttcacacaactcacccatgtaaataagctgtttattaagtaactccaactgttgatcaaatcgattacgcatatcttaaccaaacctccctgtaatataatcttctgttcttttatccgccggaatggagaataatttttctgtctcattatactcgatcacttctcccaacaggaagaatgctgtgttatctgatacacgtacagcctgctgcatattatgtgttaccataacgatagtataatcttttttcagctccatcgcaaggtcttcaatcttcgatgtagagattggatcaagtgcgcttgtcggctcatccatcagaagaacttccggctgtacagccaatgctcttgcgatacagagtctctgctgctgtccgcctgacattccaagcgcgcttgtctttaatctgtctttacattcattccagatggctgcatcccttaaggatttttctaccagatcatccagctttgctttcgaacggattccgtgtgttcttggtccgtatgcaacattgtcatagatgctcatcgggaatggattcggtttctggaataccattccgactctttttctaagcagattcacatcaatatcatggaaaatgtcctgaccgtccagaagaatctgtccgtcgatcctgcagccttctaccagatcattcatccggttgatggattttaacaatgtagatttaccacatccggatggtccgataaatgctgtgatcttattcgcttctatctcaagattcacatttttcagagcatggaaatcaccatagtgcagatccatattcttaatacttattttactcatttaagattccttcctgttcctcatctattcttttctttacgatttcgtgattcgttttgcaatcatacctgatatagtattgatcagtacaaccagtaccagaagcacaactgctgttgcatatgcctgattcatatagagtccttcactggataagttgtacatatgaaccgcaagagtacgtccggagccgaatacattacttggtacctttgcaacggttcccgctgtatagatcagcgctgctgtctctccgacgattcgtccgatcgccaggatcacacctgccaggattcccggtaccgctgacggaagtacgatgcggaatacagtacggagttttcctgcaccaagtccaaagcttccttctctgtatgaatccggtacggctttcaatgcttcttctgtacttcgcatgatcaacggaagtaccatgatcgcaagggtaaatgcacctgctaatatggaaaaaccccacccgcaggttgttacgaagaataacattccgaaaagtccatatacaatggatggaattccctgcaatgtctctgtcgtaagtctgatgacttctacgaatttgtttcctctctttgcatattccacaaggaagattgctgagaagataccaaatggaacagcgatcaaaagtgataaaaatgtcataatcacggtattaataagcgccggcatcagggatgcattctctgatgtgtaatgaagcgaaaaaatcgacggcttcagatacggcactccgtggacaactacgtacacgatcaggaatatcagtactgcaaatgtaaggatcgctgaaagcatgaccagaagcatcacgatcagagaacccggtgttctcgtataggcttttaatttgtctttcaaagtcatttcattattactcatgattcttccccctgttcaaaagtgccacacagaagttcagaagcaggatgaatacgaaaagtaccacacctgttgcgatcagtgcctctctgtgaagtcccgatgcatatcccatctcgattacgatattggctgtcagcgttctgactccctggaagattccacgcggcattctcggctggttacctgctaccatgatcacagccatggtctctccgatcgcacgtccgattccaagaacgattgctgcgaccacaccagattttgctgccggaagtacaactgtaaagattgctctttcatgtgttccgccaagtgccacagcaccttcgtaatactgtgtcggaactgctctgagtgctgattctgtcagaccgatgatcgttggcaggatcatcattccaagcagaatggatgcagtgatcatactgcttccgttgccgccccggtgaagacttcgtccgatttctcttacccacggtaccagaacgaccagtccgaagaatccatatacaacggacggaattcccgccagaagttccgtagccattttcaaaggtctgtagattgctttcggacaatagaaagccataaatacagctgtcaggattcctatcggtacaccaatgatgatcgcacctgctgtcacatataaacttccgacgatcattggaaagattccgtaaatatcatttttcggtctccacaactcgccggttaagaattttccaaatccaatcttactcattgcaggaataccatttgcaaataagaatatacaaatgagagcaaccgccagcaccgaagcgcaggcggcaactgcaaatattacctgcatgaatttttccgtccatgcttttgatttcatattattttactacctcatcccaggcaactgcattgcctgtgtaaatgtcttttacctgatcgctgctcagctcatctgttgtgttgtttttattcacaataactgcgataccgtctgttgcgattgcctggctgtcaagtttgtctttctcatcatcctgtaattcacgagaagccattccgatatcataacttccatcgattgctgatgtcatacctgttgtagagtctgttgtctgaagttcgatctctgctcctgtgttgactttcttataagcctcgatcagtttttccataaccggtgatacagaagaagatccaccgactacaacttttccggatggtttcgttcctgcataagcttctgctgaatcatctccgatatatccgttatctgagattacctgctgtccttctttactcatgatatatgagatgaagtcttttgccagttcattgtctgcacctttctttgttgcaatgttgaatggtctgcagatcttgtattttccatctttgatgttctgctctgttgcttcttcaccatcgatctttaaagcttttacagtatcatttaaagatccgagtgatacataaccgattgcgtaatcatctccggctactgttgtaagcattacggatgtgctgtttgtgatctgtgcatcatctgttgtcatgtctactttttcgccgtctttcttttcttcaattccgaaaagttcgatgaacgctcctcttgttcctgagccatcttctctggaaacgattgttatatcattggaagaatcccagtcacctttgctgctcttatcatcagaagaaccactatctgaacttccacatccaactgcaagtcctgctgccattgttgctacggataaaactgcgataaactttttcattttcataatcatactctccttagattctcatctttttttattctgatttttttctttgtcgctttcgacaatagctatcttataagacgtatgttaaatccaaaatctgcgaattgttaaatgtgtgtaaagtgtatgtaggaaatgtatggaaatgtaaaattgaatttcttaatttttcatgctataattcctctgcaggacttttcctgatcagctttttcaaaaattatattcgatattaacctttatacaaaaagctgacagtaatatgttctacagattcgaacacaatgaatacaaacatatgaaaacttattatttgagaagaaagaggatataattctatgtggattgcagatcaatggaaagattatgaagtaatagattgtagtaaaggtgagaaattagagcgctggggacagtacactctggtccgtcctgacccgcaggttatctgggataccccgaaaaccgagcgtggatggaaacatatgaacggccactatcaccgcagcaagaaaggcggcggggaatgggaattcttcagtctcccggaacagtggcagattcattataaagaactgacatttaatctgaagcctttcagcttcaagcacaccggacttttccctgaacaggcaacgaactgggactggttctctgagaagatcagaaatgcaggaagaccgatcaaagtactgaatctctttgcttacacaggtggtgctactctcgcagccgctgctgccggagcaagtgttacacatgtagatgcttctaaaggaatggttgcatgggcaaaggaaaatgcagcctcttccggattatctgacagaccgatccgctggctggtcgatgactgtgtaaaattcgtagagcgtgagatccgccgtggcaatcactatgatgccatcatcatggaccctccgtcatacggacgtggacctaaaggtgagatctggaagatcgaggatgcaattcatccgctgatcaagttatgtacacagattctgtcggatgacccattattctttctggtcaactcctatacaacaggtcttgcaccggccgttctgacttatatgcttggaacggagctcaagaaatggaacggacatgtggattcacaggagatcggacttcctgttacgcattccggactggtgctgccttgcggggcttctgggagatgggaagcggtttaacgcaataggaactgactttcccggtcctgaataaaaatatagaagcgctttctgtgctgattcaatcatggagtaactcatatgcacagaaggcgcttctatatttttattcagttacgttttcgcatgctctactcattaatcttccttcttcacggccacgttctatccccggcttctgtaaaatcaatcagcagttcgcctaacgcaacaatatcaacctctttttccattcttcagatcctccacaatttcattataccgttttttatttaaccggtagaaaaataatacaacagctgttacaatccacagaatccccggaatggttgtaaatgcatatttcataatactgataaccgtatcattttgtgcctgatttgccacgtatccatattttccaagtaatgccgcaagcatcgctgtaccgatcgccattccaatcttatttccaagagaaacgaatgcatattgaaatccatcattccgaagtccggttttccattctccgtattccacacagtccggaatgatcgcatagattgctgtattaaatcctgaaaaaaagaactgtgtaacacctgccaaaatatagaatacaactgctgaatcttttacattaaagaaatacattgccagcattgaaatacctgttaaaaaggcaaatatcgaagctgtccttcctttattgttaagttttcggaataccggttgaaaacatgcggcaccgataatggatggaataataatgcacatagaataagtagtataataagatgcatttccttctacatatgtaaaataatataaaatgtcagcatttcttccatataatgtaaatccaaataaaacctgtccgattaatgcaagtatatacggtctgttctgcatcacggcttttaactgtactttaattgatattttttccttttccggaattgtcacctgctccttcgtcttcgcaaagcagaagaaatggcatgccgcaaatatacatccatagataattgctacaaataaatatccgttcttcgcactctggcttcccagctttccaatcaaaggtactgtaataatgttgataatcccgattgcaatcatagccgcaaccgaacgcgaagtattaatttttgcccgttcatcaatgtcctgtgtcatcgcaccgcaaagtgttccatacggaatatttacacatgtgtatcccagtacaagcaggcaatatgtaataatcatatagataacctttgccgtatctggccagtccggatgtgcccagaatgtcaacattaaaagcactgccgtaatgggtgctgcaacaagcagccatggacggtaacgtccccatcttgtttttgtcttatccgtcaaccctccgacaatcggatcattaatcgcatcccagaatcttgaaaataacatcaatgctgaaacagccgccatactgattccaaacacatctgtataaaatatcattaaaaaattacttacaaacatccaactgaaattgcatccgacatcaccaaatccatatgcaattttactgatcaatggcacttttccattcttaccctcgtttcccatggctcctccttatcagcgtttctgacaaaacttctgttctctcctgatctaatctttattcctgtacattaatgattactttcatcgttgtttcccggttatcatcgatatactgataagctttcagatactcctggaatgcaaatgtttttgagatcagtggtcttaaatgaaccttttcttcatttacaagtctgattccgtcaacatagtcatcgtgccggtacatcattgtgctcttgatatccagttcatgatcattagccactgcaagatcaatctctgccattcctgcaaacacggcaaccaatacaataatgcttccttttcttgcatacttgattgcctgtcccattgtgatgttatttcctgcacaatcataaatcacatcggctttgtctggtccgaatgtttccaacattgcttcaccgaaatctttttcttttgtattcacacagacatcaatgccacattctttcgccttatccagacggagatcactgacatccgtgatcataacttttgctgctcccattccctttgctgcctgtgccacaagattaccaatcggaccggcaccaagcacggcaatgttcattcctttcacatcaccaacctgctttactccgtgaactgcaacagccagtggctcgatcattgcaccttcttcatatgacatttcttccggaattggcgttactttcgatgcatctactgcaaaatattctgatgctgttccggttgtctggaatcccataacttttaattcttcacacaaattgtattttccgtgtctgcatggataacattctccgcaataaacctgtggctcaattgttactttctgaccttcgtgaaatactgtcacatctttcccaagttttacaacttcaccggatacttcatgtccctgtgttaccggatatgaggtaaatggatgcttaccgtgatatacatgaatatcagaaccacaaatgccgatattcataatctttaccaatacctgatcatcttttacctccggaactggtacctctctgaaaataatctctcctggttttgtcattacctgctgtaacatattgttttcctccttcattcttttatcttgtcttttattaaatgttttattaaagtaattacattattgtacaaccactctattttgtcaatatatgaatgcctatttctacttgttgcacaagtttgatcaacttttttatgcatatttaccaactggatatgcatagaatttgccactggcaacttctcttgcatacttagatatctataaaacctgccaattgcagcttcttccgaacatctgacaataaaaaaagaggtaaatattcaaagtccgtaatcattacgagccttgaatttcacctcagtttttcattcttattctttttcctacaacatatcaaatttataaatgctgtatatattcagagaggaaatgttttgccgctccgacagctgatgcctctcttttataggagcaattttttaagtaacgtacatcatgttcaaaaccattatatgccatcactttttcccccagtggtatcatatactctgataaataccccccgacttctcctccaagtatgatatctgtgtcatacgccattcgcagattggaaatcaaaatagccagattatccagatactgattccatttttccacagtctttgtatttttctgctccactttttccataaattgttccaacgtcatttcctgctcttcatcagtcaatgcactggctgcgcaataggcatctgcacacccggcttttccgcaataacatttctttcctcccggcaccagaatcatatgtccgaattctcctgctttctgattctgaccagccaccagttttccattaatacagaatgcaccgcctaatgtattgttgagcgaaagatacacagcatcctgatattcatgcatatcttctgccatcatcgcagcatttgcatcatttgcaaaatacaccggataagaaaatacctgttccagaaagctcagactgaaattctccaattgcagtgcatgagatttcacaaccattctattcgcctgatcaataataccgggaatcgaaattccgattcctaatatcttttcccggtcttctacatctttcaggaagtcctccaccatttcagctacttttaagcaataagatgtttctgttgaaaattttaaccgcatccggattgttttttctatttcatactgcatgttcagcaatacgattcccagatgatttgctgtgatcactacaccgactgcatatttatatgccggattaatccctatccgttttgctttacgaccgccggtagattcatattctcctatctcgatgaccatattccggtcgatcagttcgtttacattagaaagcaccgtcggcatacttaagctcagattctgcgccagctctgcctttgatgtaattttattattgatgatatagtttacaattttagattttgtaatattctttttttcatttcgccctgccatatcagacctcttttataaattattttacaaaagtatcttagtccttttttgctattctgtaaagaataaatatgttgcttctgaaaaacttttttccaaggcacaacgatataaaacaagccaccgggacagataccactcttttttctccatcccaatggctcaatttaatattcctattacatccgctaacgaatcacagacccgatacgtaagttcccgtatctcctgtgtcggctgcacaagatccggcaccatgatcacctgcatgcccgcctgatgtgccgacaggattcctcctggcgcatcttcaaacgccatacaatattccggctgtattcctagactttcacatgctttctgataaatctccggatccggcttcgctttcttcaccatatctccacagaccacactgtcaaaatgcgaatctattccggcccggatcagattccccatggcatactctctgctggaagatgtcgctaccgccatcttatatccttgcgattttccataagccagcagttcttttgcaccttttttcagcggaagaccttctttatccacaattttccagaagttatcccgtgtcagttttccaaattcttcaaatggaaagtcttcccggatatattttctgaaatattcattccggcctgcgcggttcattccgagtgtgtgatagatgacgtcctccatatgcgggattcccaattcatcacctgcgatctcccatgagcgctgtacaatacgctcagaatcgaacaacagaccatccatgtcaaatataaaagcttttatatccatcctagaactctatgcctcttccaagtgcatccttcagataatctgcaacttcttctaatttatgtacggcctccatcttctcttcgaattcatccccgatggattccttattaatgagtgcctgctgaatcttctttacatctttgattaaattctctgtcatatcaaaaacctcccttttactgtctatcaggaaatttactttccgatgatcgatttacctcaatgtatgtatcagcattataacacaaaactttttactattctctgaaattatgttacaatttgattaatttttgcaaattattatctttttctcagatttgttcatgcatcattcgaacgaattcttccattacacgtgttttatatttgtgtgtcttgtaatagaagaatacttttctctttgcttcttccccatctaatttgtagtacaccagattttcaaatgtcgggagctggcttaccaggatatcgctgatgaaggttgctccaagctgcgtagacgaggccatatatgctgtcgactgctgattgaattccaacacaatattgggtttaaatccaacatttcggcacagcctgtctcctctggttctggtatcatttccctgtgtcagcataataaacggaagatctgcaaatctccctaacggaactgccggatatttctggttcagataatttttatttttgatattcttataagaaagctgatacattcccagttcttcatttacggcaaaatgttttggaaccgcaagtaatatattttcttcgcaatataattctttattatatagaatactgtcatagtgataattatcaatgacaaaatccagcgcattactgcccagcatttcttccagttcggctgtattcccctctatcagctgaatatgtacatccggaaatttctgattaaattgggtgatcagagacggtaccacatatgcggcaaacagcgtacttgctcctactgcaagattccccgtcttcagacccgccaggtcattgatgtaattctctacccgctgttcgatctgggtgatctcctccgctgcctcaatatatacttttccgacctctgtaagctggagcggtgttgtacttctgtcaaataatggttccccgataatctcttcaatctttttgatccttgcactcaaagacggctgactgatgtacagattctgtgccgctttggtaaaacttctttctttatacacttcataaacatattttttccatacaaacatacacgtaacctctcatatcctgctatcatctgtttcctcttttcacatgacagctatagtcagactcttataattgttataacactataagtattagattctctgtccacacggacgtatcattatattaatgaaacaattattccaatatgaatttggggtttattggaataaagataaaataataaaaagcggggaataaaattatgaaaccaatcgtacgcgccgggcgcatgaaaccagtacactctgatatccgtggtccattattcgtagaagccatgaaacgccagaaacaggggatcgatatcttaaaattaaataccgggaatcctgcaacctttggctttggtctgcctgacagcatcaaaaacgctctgatagaacacatgcaggacggtgtcggctactgtgacttcaaaggaatgcctcaggcaagacaggcaatctgtgattatgagaccagtaaagggatcaaaggtatcacatcagatgatgtattcatcggtaacggtgtcagcgaagttgtatcgttcgctttaacacctttgttaaatgatggagatgaagtcttagttccttctcctagttactccctctggggcaattccgtatatctcgaagacggtaaaccggtcttctatacctgtgatgaacaggccaactggtatccggacattcaggatatccgttccaagatcaccgataagacaaaagcaatcgttatcatcaatccgaataacccgaccggtgtactctatccaaaggaactccttcttgagatcatccagattgcaagagaatccggacttctgatctttgcagatgaaatctatgaccgtctcgttatggatggcaaacagcacatctctcttgcttcactgacagaggatgttccggtcattacattaaacggtctgtccaaatcacactgtctgtgcggataccgctgcggatggatggtcatcagcggtccaagagaactgaccgaagattacagacagggcatcatccagttaacatctctgcgtctgtgcgccaataccttggcacagatcgtcatccctgcagctcttgatgatatggatacacctgcttctatggtccggccgggcggcagaatctatgagcagcgtgaagcaaccgttcgtgaacttgagaagatcgacggtctgtcatttgtaaaaaatgacgctgcattctatgtcttcccgaaactggacgtgaagaaattcaacatcaccaatgacaagcaatttgctcatgatctgctggatgccaccaatatcctgctcgttcccggaagtggattcgactggaaagatccggatcacttccgtatcgtcatgcttccgcaggcagatatcttaagtgatgcgattcgccggatgggaacattccttgacggatataagcagaaataatatgagcagcagccatccttaaatagtacatagataaaatacattcccggtaaaaatccaatctctcttttttcatcgatgtttcagttatccgggaatgtatttttatctgcttttcactgtattccaggctccgactacttcatttacggtgctgactgtcacaaatgcatgttcatctgtttcgtggatgaaagataataattttccatattcattcttttctaatatcgttacaacttctacatgctctgcatgatccagacctccatatgccggataaatcgtcgcacctctgcgtaattcctttacaatataattctgaattttttcatgctcctttgaaagaatggatactttcttacgcacatggaatccatcacagaaccggtctaatacctgaccgtagatcaacgtaccaacaagacttattaccattgtctctcgatcatatacaaagatcgctgccatcgatatgagcacacctatgatcgtaatactctgtcctattttaaatccaagatacttattgatcaacttcgcaacaatatcaattcccccgctggatgcattcatgttaaataagacggcctgtcctgcaccacccacgatcatgaagcataccagatcgatcacgatattcccggacaaggattccacatgcggagtcagtatctcaaaaatcctcagatacatcggaagcataagtgatgcaagaacggtcttcacaccgaattccctgccgataaaaatataccctatgaccaacagtatcatatttaagacaaatgtaattgtcgataccggtaacggaatgatctttaccagaacaagaaccagtcctgacagacttccaagcaccagattatttggcatcatttcataatatacagctgccgacattaagaacatgccgcccagcatcataataaattctttttttgttatcttcatttcattcttccttaattcaatatttccgcacaaagatgtactcctcttttttgtgcaaagaggagtacatctttttctgaagggtgtctatgcctaaatctgtttcaggcatatctatacaattatcattgtttttatccagcacccggcggttagtccaccaatgccgataatttcttgtccagagctatcatgatcagtgccgctgcaaacgatacaaccgcaactccgatacatgctactttgaattcaatctttccgccaaacagcagtccatataccggaccataactctttgctgcgataaatgttgcaaatccccataccgacatcataacagccagataacggctcggtgaatatttactgataaatgaatgccccagtggtgagaagaacatctctcccattgtcagaaggaaggcaaatacgatcagccataacacacttgccttttccccaccacgcatgatatcaattgctgcgtagaagagatatccgacaccgatgatcgcaattccaagtccggtctttctgaacagactcatatccccctgcggtcttgccgctagtttcttccataattccgctgttacaggtcccaggataacacagaacagtgagttggctgcatcaaaccatgtagacggtacctgataacctgctactacccagtccatattctctgcccagtagaaatataccggcatatatcccagataccagaatatccagaatacgatggagaataacgaagctacaaagattgcaccgatacgtttcttctcgatcattgtaagcggctgctttgttcctgtctcttcttttttctttgcctctgctgctttttcctcttctgtcagagtcttcttgaatggaagctttccaagatcacctaagaatctccagcacacaaagatataccagagtcctccgagaaccatcatcaatgctgccatcttaaagcatggtgcaaatccaagcacaccatcttttgcaaatacatccttatacaggattcccaccaggaatgttccgatgaatgcacccacatttaccagtgtataacgcatcgaaaatgccggatccatctgtgatttgtccgtgataacacgtccgatgatcgcaccgtttttgaataatgcaagtcccagacttaccaggaagatcatcgcatatactccggcggaactctttgcgattcctccggtgaaatatcctgccgcagcaataaacataccaaccggtgtcgtatatctcgcaccgatatacttatctacgatcactgccccaaacagtggaagcagataagaaaatgcggtcaggtttgactgcatattggcagccactgtatccgaaagtccgagtcctccggttgcaaccgaagcagttacaaaaatcaaaatcagcgaacgtcccagataatatgccagacgttcaaaaatctctgtacaggcacatacccagaacgctgccggaaagcctttcttttttgtatccatattcttttccccacttttttctaaattcagtccttactttttatgtacttttattttctcttccttattattttgtacatatatccttgtctgtcttattttatatctttcaagaatgctttatatcctctgtaagcttcataaatatcagccttacttgtcacctcatacggtgcatgcatagaaagtacagcaacaccgctgtcaatgacattcatgccataatttgccatgatatatgcgatggttccgccgcccccaagatcgactcttcccatctccgctgtctggaatccgacttcattattgtctaatacctgacgcactttcgcgatatattctgcattggcatcgttactgttattctttccgcggcttccggtaaatttattaaacaccagacctcttccaaaatatgctgtattctttttctcaaatgcatctgcatacaatggatcaaatgctgcacttacatcagaagaaagcatataagaatttctcagagctcttctgacttttaatggattgccatcttcggtaagtgccatcagttctgccacataatcttcaaagaatctggaatgcatacctgttgccccaacgcttccgatctcttctttatctaccagaatacaacagcttgttctttccggattctctgtttccagcattgcaaataatgaagtaaaagcacagaccctgtcatcctgtccgtatccgatcaccatacttctgtccagtccgcagtctcttgcctttcctgccggcacgatctccagttctgctgagagaaaatcttcctcttccatatcaagattctcctttaagaactgtactacggctgcctttaccagctctttttcttctttttctaactcatcattgcctgtaagcggctttgttgcaacgaggatatccaatccttccccttcgactaccacgcccgcctttttctcaatctgctgctgtgacagatggatcagaagatctgaaatcacaagtaccggatcatcttccttttccccaataataatgtcctgcactgttccgtctttttttgcaatcgttccatggattgcaagcggaattgtaacccactgatatttcttgatcccaccatagtaatgcgtatccagatatgccatatcactgtcttcatataatggattctgctttacatctattcttggtgaatcaatgtgtgctccaagaatattcataccttcttctaacggtttcttaccgagctggaacattacaaacgctttccccatgcagtctgcatacaccttatccccggcttttaaagtggttccctcagaaatacaatcttccagattcttatatccccatgcatctgccatcttctttccaagctttacacattcacgctctgtctttccgatatctagacattctttatagcggacactcagctcttctaattctttctgctgaatttctgtgtattctttccacatattttttcgctgcatcttttcgctcctcctttttactttgcagtctttctataaaaatagtatctccgttcacagaatatatccaacaagaaaagcgcatgtactataagaaaatcttatttttttcattgttctgtcaaatataaaatatgtattttcccattataaaatcgcaaaaaattatcgatcgtttttcacaatcgataattttttcttatgagttcactacatttttaatttcttccagaatctcttttactttctttttgtttcttttttttctgtagaatgctttgatcacgcactctccttcatatcccggaagcagcagcatatctccatcactataggagaaatactgactgtctgccagtgcatatccgtcgttaaattctacctttaatttcatggtatccacattgtcaaccaattctattccttgtgtaagcaactgcggatcattcttttgtccattcatcatactgcataaatatgactttgttccatatctggtataacgctcaagatcctttgctttaaactccggctgctcatttatcgatgattccagtccgatatatgctccgatccggctggatatcagcggcttttctcctatttcatccagctgctccaactcatttagtccgtatccaatataaatatccaatgtattttctctcagcatccggctgcctatgtaggaatccagtttactgaagtggaagtctgcttcggaatgcttatcattaatcatcttctgcatctttgcccagaacaatttgtttatagaactatcgattccgatacggactacgctgctttctttatatctttctatctcatgcagcatccgttcgtgcgtctgcaccatctccctggcatactcatagacaatctcccctaattctgtcaggcagatctcaccattgcctctctccagcagagtccctcccgccattttttccaaagaggcgatctgctgacttactgccgtctgtgttacataatttcttgctccggcctttgtaaaactcttgagttccactacatccaaaaaatatttatatttccaaagactcatttcgcatacttccttccgatgactgcttcagctgatatatttttctactcttctccctcggccagagtacacttgcttttaccgaagcatctgctcctactccacgggtaatttcacataatgccatcacaccaaatgccagtccgacaaacagaaatccaagtcctacttttttgaacatattcatatctccctgtggacgttctgcaagctttaatatcttttgtcgacaatcgtcaatgattaaatgtaatatatcatatttttgtatatttttcaacatattatttgtattttatatctctttttgtattttatgcacaacatctgtcatttcaaaacctgcacatgctaaaaagagcgttacaggcatctccttacaacacatgacaaaaaaagaaatgcctgtgtcattacaccaacatttctctttttcatccatcattcattttcctgaaatcatgctctccaagatccctctacgacttctttatgaaatcagaaagtccagtgaaaacttcgtgtctgcttccgtcattccctgttcttttaaaagtctgtggatcgtactcatataatgatccgacaataccctgcagatttcttctttcttcctgctcttgcatgcttccagcagttctttatgtatcggatattgtcgtgtgattactgcttttttgtccgatgccagattataccccgttacgatattcccataattcagacttttccatgccttatacagacttttcattccggtcattctgatcagacagctgtggaacttattatcatatgaaaacagctgatcatattcgtccacatccagattcttcatgcgttccaggatttcttccatctcctgcagggtttcttccggtatctttcctcccagaagacgcactgccataatctcataattcgcacgcatcagatagatttcaaatgattcttcgaatgtgatctctttcacagaacatccggcatttcttacatattctaccaggccttcgttctccagttcgcgcagtgcctctctgatcggcgcacggctggtcttgaattcctttgcgagttcctgttcgacaatcttctgtcccggctgcaattccctgttaatgatccgttttcttataatatctacaatactttcacgtaatgtcttgtatcctaattctgtcataacttctgttatcctgtcttatttttctaactactggttaatctgataatttccatccgaatcagcctggatatgcgatgcataaaatgtctctaccgctttcaccatatactccgtgtcctttacaccggccgtctcataggccgaatgcatggcaagctgcggtaatccaatatccactgtattcatggacacctgcgtcatcgcaatattccccaatgtacttccaccggcttcatccgaacgattagcaaaatactgtaatggtacgcctgctttttcgcagatcatcctgaatactgccacactgaccgcatcactcgtatatttctgtccggcatgtgatttgatcacaatgccgtcattcatatagacgcagtttgtcgcatccgtcttctgcctgtaattcgggtgtaccgcatgggcattgtcacagctcagcataaagcttcctgctactgcacggtagaattcctcttcgttctttccaagtgctttgttcattcgccacaatacatcataaagaaatgtagatgcagctccctgttttgttcccgaacccacttcttcgttatcaaaacaggcatagacattgatattctgttcattttccgctgccaggaatcctttcatagatgtaaatgcacactgcagatcatccagtctcggacacccgataaattcacggttgcttccccatctgaccgctcccatacggttatacaagaacagatccatgccatagatatccgtatcttttaatcccaattcttctgcaactaaggatcttacctctccttgttctttcacgcttcccgataataccggtaacatatcaatctgtttattaacagctcttccttcattcactttccggtccatatgaattgcaagactcggaatcatcagaagatctctgtccaccttcacaagtctggtttcgattctttccccattcttaaccataactcttccggccagtgacaatggtctgtcgaaccatgtctggcagatcataccgccgtaaccttcggtattcagtagagtatatttctttgcgacctcaatctccgcattttctttcagtttaaatgccggcgaatcactgtgtgatgctgtcacatggaaactgtagttgtccagttcttttccggcttttactgcaatgatactggaattatttcttgttacatagtatcttttcccaggtttgaccttccacttttctgactcttttaattcttcgaatccttcctgcttcaggatctcttttaattctgcaaccgcatgaaatgctgtcggtgcatgttctataaatgttgtcagttctgatatgatatttgtttccattatattcctcttcatcttccgttttgttccgttcctgtctgacaaatgtaaacggttctttactgtacttccccataatacagcagatcgtcattacaaacaagcaccaaccgccaaagaaatccctgtttattttgcaaacataccaacgatatcttttaccatcacaacagctttatccattccttctactgtaatgtgctcatataccccgtggaatgcatatccaccggttccaagattcggacaaggaagtcctttaaaacttaatcttgcaccgtctgttcccccgcggatcggcgcaacatctggaacgatatccgcattttctgcggccttctttgcatattcaatgagctgcatgcatggttcgatcttctcacgcatattgtaataggattctacgatctcaatttcaaccgttcctgctccatacttttcattcagactgcctgcaatctcctgcatttttgctgctcttacatggaatccgtctgtatcaaaatcacgaataaaatatttcatctttgtctctgttacatttccattaaagcttaccaggtgataaaatccttcatacccttccgttgtctccggtctttccgacaccggcagcatctgatggaattctgttccgatcgtctgtgaattcaccagtacatcttttgcagttcctgtatgtacactgacaccatggatcgtgataaatgctgtagatgcattgaagttctcatactggatctcaccttcggcgcttccatctaaagtatatccgtaatctgctccgaacccttctacatcgaaatgctttgctccccttgcaatctcttcatccggtgtgaatccgatacagatctttccatgtggaagtccttctttcagaatctcatctacgacagtcagcacttctgcaattccggctttgtcatccgcgcccagaagtgttgttccgtctgtcgtgatcaatgtccgtccctttaaatctgccagatatggaaattcttctactttgatcgtctttccgcttgttccaagtactacgtctttgccatcgtaattctcgatgatctgcggatgaatattatctcccggcgcatccggtgctgtatccatatgcgcgatcagtcccagtgcaggtgcattttcacatccccgtgttgcaggaacagatccgtatacatatcctttctcatccactcttgcatcttcaattcccagttctttcatctcttccaccagtaactctgcaagtaccagttccctgtctgccgatggaaccgtctcgctcgtctcatcacttgtcgtccatacagacacatactttaaaaatctttcgtaagctttcatcttacttcctcgctttctgcatttcttaactttattgtaaatcattcttttataaatgtataatggtgaatgtcgacaatttaatgttcttaattttgttatatttttcccgggatttatgttaaaattcttttaggtgctctgatatcagatctcctgatattcattctgatattagatgctctgacaacagatacttatataatatcaaagtgaggtatatacatatgaaattaatgattgcatccgatatccacggctctgcttactactgccgtaaaatgcttgacgcttacaaacgtgaaggtgctgaccgccttcttcttctcggagacatcctttatcacggtccgcgtaatgacctgccaaaggattacaatccaaaggaagttattgccatgctgaatccaatgaagcaggaactgctctgtgtccgcggtaactgcgacacggaagtagaccagatggtactggaattcccgattcttgccgactactgcttccttgaaattgacgggcgcaccatcttcgcttctcacggacatcatcacaatccaaagaatcctccgatgttgaaaaaaggagatattcttctgaatggtcatacacacattcctgcaaatgaagatatgggggattttatctatatgaatccaggttctgtatcaattcctaaggaaggttctgctcatggatatatgatctgcgagagcggggaattcacctggaaggatctggaaggaaatgttgttgggatttaatttattaactgggaagcggcctctcagtccttgaaggaaacaatagataaggattattgtttccttcaagtcgtgactggcagcgaatgttaataaataaaatgcccggaagtgtaacccggtgaaggccactaccttgtctaacgcgacagctagattaatataccacaacaggattcgaattgtcaacattgtttttatattttctgcaattcagacaatttagacaattcaagtttaatttatcgtgctcttatggacattttcacaaaatgatactttatgacatatcatagcatacaaaagaacctgtcactggcagtttcttacaaatgtatggtactaaaaaaagagtccggaaataatcttcccgaacccttttacattttttaatatttcactcctgtcgccagtttcataatcggatttccatcatatattaatttcagcaatgtattatcctctaccattctgtaaatttcttttccgatatctgttgtatacattaatgtgatcaccataaatataatccagacaataactaacgcaatccccattccgaacagtcctcctgccagatgattcaacgctccgactcccggaagttctgttacaatatccagtgcaaacacaactgctctcaaaataatcgtgaccactataaatgttaaaatgaatgcaataatattgatcacctgttttgcaatgtacgcacctacatattgtgcaaaagttgtaacccccagtttctggtaggttgctttattattattctttaacagcagatttttaaatgccgccggtatatcagccgacttgatcaatgtctcctgcagactctccggtatatctgcgttctcaattgcattttccaccgattcattcccactattttttaatccatccagtacatttgccgaaattccatactttgcaagatcatcactgctgactttaccacttacaatatctgctatagagataccgtaactttccaatttttcttcactgactcctgctgccttaagtaccttttttactgcttcttccgtaagaccgcccttgtctgaataagagtctccaccactgaccgccgatgtcgctgcatctgccattgtacttactactttctgtcttatcatatcatccagcggggtatatttttcgattgtctgcgatacatacggcgtcgcaaagaatacgatcacaagtgtcactatcgtcgctacaagcgacactatgatacggactgcacctcttatcagtcccgttatgatacatataagaaaaataatccctatggatatttccaaccaattcatagtttctccttattttacaagacggaccttttccattccatttgcacttaacacaatatattgattcactccgccaaccgggaacatttccaatatattattatccatcctgcctttaaatttctgtattccattcttcataaatatactgcagttttttccatcgtacataataacctggtttccacaaagttttacgtgactgtaatcgcctttaaattcttttgacagaacaacttttccgcttttattataaaggcgcagttcatatccgcctttaccctggtttttcaagatcataccaatatatttttcattatgaaatacacttttgatctctttgtccatctttatctttacggactgtttcggaacttcttttccgctatagatggccatacagtcatcaccgattgccacggatgtatctgcatccatgaaaaatccggaggccagtatcgtattcttataattcttaccggatactttatgatcggcttcatcctttccggctttcccgaagttataataatataatcttgacaccatctgtccattctgcgtgtaaagatacacaacctgcatcacttcaccgtttgcagataatgctacgtccaccggataacctgtcccagccagagatgtcttatgttccaccagaacatttcctgcagtgtcatagcagattactttcattgatgtgtcattcttcaatatggcactgacgattccctgctctgatacgcttaccttttctatcggcattgtcgtatgcacttcacctttcaggccatcctcctgcaggatcaaaatgtcatttccttctttatcagctactgctgccgacttgtcgctgacatctatcatcggattctttatctgatatgactggttccatttttcttttcctgattgattcagataagagattccgtctttactgtattttaatacaccatccaggaactgaacataattattatctgctgctccttctcctacatacgtatcactgacccgtactttcgtatatgtctggagattaatcagcagatacaccaatatcgcagcaattgctatgaccgcaatcacaatccctatttttttttgtttttttcttttccttctggccagttcttcctgaatctccttttctgtcactccatcttcgctgtttaattcatccataatctcttcgataatcttatctgtcggatcttccggctctctcacaacatggagattgctattcttcctgcgtttcatccgtcggtcatcctttcaacgtttcttctgatactgtgtaccttagtataacacatttcccatttatgggagtaacaatttttgtccgatatagatcaggttgccatccgataatccattcattttgcatatcgcctttacatgcgaagtatctccatataatttcttactgatccccgccagtgtttctcctttctgcacaacataataatccttatctgtcaattggctttcttcctccttagagacctttgcctcttctgattttttcactgtaccggatacttcttttgctccctctttagcctcggccgctgttgttgtttttgtatcttcttctgtctgtccgttttccatactttttgaaagattttccagcgatgtctgtaccgacttcattttgtcaaaattatttactgttgtaattccgatcaccagcacaatcaacaccagaagtgcactggttatataagcaaattttgaactttgatgctgttctttatattccattttttctctcactgcactacgaaaatcctttgcagctcgatcctcaaccacctcactgggagtcaccccgttctctcttcttgtattgatcatgtagttctgcatctccggatttttctcataataaatataatgtcctcccatctgcataatttctccgaatttgtatgcatagaagacttcttcctgttccctcgcatttttccacaagaacagattccattcttctgcgaactctttttcctggatccgtttaatttctctgttacgactcatcggactgccatcttcaatgatcccccatccaacgatccggcattccgggaaaaaccgggcagcttcttcttttgcctctttcattatctcatctgtaatttctatatcatttccatttgtctttacttctttcatctgaaccgcaccggatacaaatacggcattttcatcctcaagtttcagcagttctcccgtaagtatcaccccgaccggttgttctctggctttctcccgcagctgattcaaatatgtatccacgtaatcttctacgtatatctttggattgtcacttacatttcctatctgtcttacatttttcggaagttgtctttccatgatacattcacctcattttaactattttaaattgcggtccggttatattaacactgcgttttacaaccatgctgcaattattttcgcatatgataacatatagggaatacatattttatcagttgatgggacttgtccgaaaaaatatccgatacgcttttttgtttctcgacatacttcgtaaaaaggagctaaagacctctgttataaatgtaaaaaaagatagaaatacccaaaagtattcctatctctctatcgtcttattcgtttattctataaccacaatattcccgcaatcctgatatccttctgcgatacgatccgtgatcacaactgcacctgtaaatgccaggaaagttactgaactgacctctccgaatttagaatggtcacataatacatattttttctggcattgttctattgcggttttcttcaccatagcttcattcgcatccggtgtcgtaaatccggctttcttagtcacgccattggttccaaagaaacctttcgtaaaatggtattttctaagcgtctgcatcgcttcacttcccacaacagcttccgtcgaacttttcagttctcctcctaccagccggacttttacgcctgctttggccaaccgctgtgcgtgcgcaacagcattcgtaacaacagttacatccttatcacagaagaactccagcatatatccggttgtcgttcctgcatccagatatatgaactctccctgtccaatcaacccagccgcatattctgctatacgctgcttttccgatacatgaactgtaattttctgtgccactgtaggctcctgtggcgtcactacgtgatccgatgcaaccgcaccgccaaacactttcaccagttttcctgcattatgaagcgctgtgatatctcttcgcacggtcgattccgatatattcagaagttcttttacttccgttacggtaatgctgccctctttttcaagaagcttcaatatctgttcataacgctgttctgtaagcatatgacctcctacaggttctcctgcatgaatttacttactgcttcacatgctgcttcttcatcagcaccttcaaatgtgaatgttacttcatgacctttctttgctccaagacccataagaccgaagatcttcttgcagtcagctttctttccttctttttcgatcattactgatgcttcgaaagattttgcaagtttaactaactctcctgccggacgagcgtggattccttcgttatctgtgattacatacttaaattctttcattttcatacctccataaatattacattttgtgattttcattctattcattttttacaggtctgtcaatatttctactggcaaacctgtactttaacatttatttcctaagcgactttctttttcagcactccaagtaatactgctgagattacagttcctactaccagtgccaccagatacatcagcgcatttcccactacagggaacacgaagattccaccgtgtggtgccatcagtgtacatccaaatgccatagacagtgctccggctactgcagaacctacaatgcaggatggaagtacatgaagcggatcagctgccgcatatgggatcgctccttctgtgataaatgcaagtcccataacaaagttggtcggtcctgcttctctttcggattttgtaaatttgttcttaaataataatgttgcaagggcgatcgcacatggaggcgtcattcctccgatcataaccgctgccatgatgtcatagtttcctgctgcgattgccgctgtaccgaatacatatgctgctttgttgaacgggcctcccatatcgattgccatcattccgccaaggatcagtccaagcacgatcttacttgagccgcccattcctgtcagtccattgttcagtgctgtgttgatcgcacccatgatcggttctactgcaaagttcataaggagaccgattcccagaattccaaataccggatagatcagtaccggtgcaattttctcaagtgcttccggaagtttatcacataattttctaagaaggagaatcagatatccagatacaaaacctgctaccagtgctccaaggaatcctgattttccatttgctgccataagtccgcctacaaaaccaactgcaagtgccggtctgtcaccaatcgcttcgccgatatagccagccagtaccggaagcatcagtccaaatgcaagatcgccaattgtcttaagctgtgccgctaccggtgtgatcgtgccgaagttacctctgtctgctgctgataatgcattcatatctacacagagtccgtcaatcaggaatgcaagtgcgatcaggatacctccacctactacgaacggaagcatatgtgatactccattcataagctgtgtatagatccgatgtccgattccacttgatttgccgctgttgctttcctttacttctgctccgtttgctgcatgatatacagggacatctccgttaatcacacggtctaccagttcatctgctttactgataccatccgatacctggcagataattactttctttccatcaaaacggtccaacggtacctgcgcatcggctgctacgatgattccgtctgcctcttcaatctctttggccgtcaggacattttttgctccgccggaacctcttgtctctaccttgactgcacattcctttgctttggctgctttttcaattccttctgcggccatatatgtgtgcgcaattcctgtcgggcaggatgtaactgcaagaatctttacttttccggttgtctcttctgctgtgctttcttcatctgctcctgcaagtctctcatcaatacctgcttctttttcatccgcatcattgataatgttcatgaactcttcaactgtctttgcatttcttaaggattctgtaaattcttcattcatcagaagaacagataatttacttaatacgtccagatgaatgttatcttctgtattcggtgctgcgatcaggaacattaatgttaccggttcgccgtccagtgaatcaaaatccacaccgtcctttactaccattgctgccagtcccggtttggttactgcatcgcattttccgtgtggaattgcaattccctcgccgattcctgtggtactttcttcttctcttgcatatacctgctttctatatgcttctttgtcattgatcttttcgctctttaccatgagatcaacgatctggtcgagtgcttcgctcttgctctttggcgatgcatccaaaagaatacttcttgcatccagcaaatctgtgattctcatatgattttccctcctgttgataaatatattttctttgcaacacttctctcttttatgccttacaccagctgcttatatacttcttctacttccggtctggttgccagatattcggaaaatgcactcgcacttccggttgcgactcccatatggaaagcatgctcataatcctgcttttccatccagcctgccataaatcctgctaccatggaatctccggctcctacaccattgaccagtgtgcctttcggtgccggtgagctgtagacctctccgttctctgcgatcagtaccgctccttcacccgccatggagatcagtacatttctcgctcctttttcctgaagctttcttccgtaaggaatgacttcttctcttgtcttaagagtcactccgaaaatctcaccaagttcgtgattatttggcttgatcaggaatggatgatacttaagaacgttcatcaggagatctcttgtcgcatctacgacgatcataactcccttatctttcagctctttcatgatccggctgtagatatcatccggcatagacgccgggatacttcccgcaaggaataagatacctccttctttcatcgtattcagacggtccatcagttcttctactttgtcttttggaatctcaggaccacttccgttgatctctgttccgtcgattgatttcagctttaaattgattcttgatattccttcttcaatctggatgaaatcagatgtcactccgtcttcttccagtcttcttgctatttcttttcccgtaaatcctgccatgaacccaagtgctgtactttcaattccaagattcttaagtacgatagaaacgttgattccctttccacctggaagcatgagttctgagcttgtacggtttgtaagtccgagtttaaaatcatccaccgaaacgatgtaatccagcgatggattaaacgtaactgtataaatcatatttcttacccctttcaacttattgagtttattataccgtcaaactcagtcaatttcaatcatgttatttcacaaatattctggttgtttttgattgaatatgcacaaaggcgtatggcgattaaaaaaggctgccatccaacgaaattttttcgtcagaatggcagcctctggctatccgttctatattaattatttcacgaattcttttacttttgcataaatgctgtctgcatcaagaccatatttcttaatcagttctacagccggaccagactcaccaaatgtgtcatttacaccaatcttcattaccttagctggtgctttctctgcaactacgtcgcatactgcacttccaagtccaccgataacagaatgttcttctactgttacgatctttcctgtcttagccgctgctgcaacaactgctgcttcatccagtggtttgattgtgtgcatgttgattacttctgcactgattccgtctgctgcaagcttctctgctgctgcgagtgattcagatacttcaagacctgttgcgatgattgtcacatctgtaccttcacgaagtgtaatggctttaccaatctcgaatttgtaatctgcgttatcattgataaccggaactgcaagtcttccgaaacggagatatacaggtcctacatgctcataagctgcttttacagctgcttttgcttctacatcatcggaaggattgattacgatcattcccgggattgttctcataagagcgatatcttcgttacactgatgtgtagctccatcttctccgacagagattccggcatgtgtagcaccgatcttaacatttaattttggatatccaactgagttacgaacctgctcaaatgcacgtcctgctgcaaacatagcaaatgaacttgcaaatggaacttttcctgtagcagcgatacctgctgcaactccaatcatgttacactcagcgattccacagtcaatgtgacgttctgggaaaactttcttgaacattcctgtcttggtagcttctgcaaggtcagcgtctaatactaccagatcttcatgttcttttcctaattctactaaagcattaccgtagctttctcttgttgcgattttctttacttctgacataatgcttcacctgctttctctaattcttccattgcctgtgcatactgctcatcgttaggagcttttccatgccatccagcctggtcttccatgaaggaaactccttttcctttgattgtctttgcaataattgcagttggcattccctttgtcttgcgagcctctttgaaagctgcttcgatctggtcaaagtcatttccatcaatattgatcacatggaagttaaatgcctcgaatttcttatcgatcggatatggagagttaacgtctgtaatctttccatcgatctgaaggttgttattgtcaacgatcactaccaggttgtccagctttctgtgtcctgctaacatagaagcttcccatacctgtccttcctggatctcaccgtctccgagaagtgtgtatactctgtaatcatcatttgaaagtttagcagaaatagccattcctactgcagctgagatgccctgtccaagagatccacttgacatatcaacacctgggatgtgtttcatatccggatgtccctgaaggtatgatccaactttacgaagagttgtcagatcttcaaccgggaagaatcctctgtgtgccagtgttgaataatatcctggtgctgtgtgtccttttgataatacaaaacggtcacggtctgctttcttaggatccttaggatcaatattcatctcttcaaaatacagatatgtataaatgtctgctgctgacagtgatccacccggatgtccggattttgcactgtgaactgcagtaacgatgcccttgcggacttcgttggctgtcttcataagctctaatttgttcatgttgttcctcctgaatcatttatatgatagctttacttattcttattctccgaatactgctttgtaatcagcctggaatttctcgattcctgcatctgttaatggatgatgtgtcatctgctcgattactttgtaaggtacagttgcgatatcagcacctgctaatgcacagtctgttacgtggattgggttacgtacgcttgctgcgatgatctctgtatcgattcctgcaacttcgaagatctgtgcgatctctgagattaagtctactcctcttgtagagatatcgtccagacgtccaaggaatggtgatacatatgtagcgccggctcttgctgcaagaagtgcctgattcgcattgaagatcagtgttacgtttgtcttgattccttcagctgtaagaacttttactgcttttaatccttctactgtcatagggatcttaactaccatgttaggatggatcttagcgatctctcttccttcagcgatcatgccttcagcatctgttgttgttgcctttacttctccactgattggtccgtctacgatagaagcgatctcagcaataacttcttcaaatactttaccttcttttgcgatcagagatgggtttgttgttactccacagataactcccatgtcatttgctttcttaatatcttctacgttcgctgtgtcaatgaaaaatttcatgttattcttcctccttaaaaccggtgaaatctgttcaccattcccttgttatcgtttggttgaattatactctatttaaggagctctggtcaatagctttgattttttattagtaattttttctgttaatattataaaattattaattgaatttcgcatattttttgtagaaatgttaacgatatttttttaattttttcatttcattaacgatttttacgcattttatgggattatttaaatttaacatgcatttttgttttgtaaaatctcgaatttattaataataattttcgcaaaagaattaatttttcttttttcgggcatttttcgcatacgttgtcgtcccccggacgattaattgcggctcatactccacatgatatgtactgatcggaaccgcacctgtattcgtcgaatgatgtgtggctatcttcttcattattatatcacatgcatctcttcctttgaaagtcacaaaatgttcgatggtcgtcagattcatgttatgcattcttgcaaacaaggtgttgtcacaccccatcacggacacatcggtcggcacctttatctttgcttcatgaagtgcatccatgattccaaatgcgatcatatcattcagtccgacgattgctgtcacatccgtcgtttccttcaacaattctttcgtcagctcatacccgatcttgtactccgaatcaatatgcgccacatccagatcgatttcttcttttgccgcttttatgatcacctggtcacgcaatccgactttctcatattctttcaggaagccctctacccgcttcgaacgctgcttctgccttgccgtaagcggcggtgctatatatgcaactttcctgtgtcccagttccagcagatgtttcgccatgactcttccaagcttggaattgtcaagttccaccgcatctacattcatcttttcattctggttattgacgatcgcaaccggtatctgttctgcaatttctcccacaagttccataaagcaatggctcggattacaggtatagataattccaagcggtcttaactgccacatcattttcagatagcgctcttccattctgagatctctctgcgtattgcatacaaaaaggccgaaacctttttctttcgcatgtgcctcaatcccctgaagcagcataacataatacggattcgtcaggtttgggcagaatacaacaagaagcttctcccgttttgttccttttctcgttttccgcttcggcgggacatatcccagttcttttgccgcattttccactctttccacagtatcttttgcaaatgatacatcgtactttttgttcaggatcatggaaactgtggactgtgataccccggcagcatgtgcaatatccgttgatgtaacctttttcttcatttatctcacctccaatgctgaccgccaaaactctgctgaacctgacagctcattacgattgctttggcaactggcagctttttcaaacgcatgataagtaaaaaaggggacagggctacagctctgtccttccttcaagtgcccgtagaagtgtcacttcatcgatatactccagatctcctccaaccggaacaccacttgcaatcctgctcaccttaattcccgtcggtttgatcagcttactgatatacattgctgtcgtctcaccttccaggcttgagttcgtggcaataatcacttctttcacatctccctgcagacgttcgatcagttccttcagtttaatatcttccggaccgataccaagcatcggagagattgctccgtgaagcacgtggtatacaccgttatattttccggtcttttcgtatgccgcaaggtctctcgtattctccactaccatgatcgtctggtgatcacgattactgttgctgcagatcggacacagttcctgatccgtcagtgtataacattctttgcaatattttatgttctctctggcttccaccattgtagaagccagtctctttacatcatcaaccggcatatggatcagatgaaatgcaagtcttgccgcagattttgctccgattcccggaagacatgacagttcctcgatcagtttgctcatctgattactgtaataatccatagtttttaactccctgtaagaataattctcccggaaccttctccttaaatttctcctagaataatcccggcattccgccgcccatgccgccggtgaacttagacattgcagaagttgtctctgcgtctactttctccaatgcttcgttgactgctgccacaagcagatcttccagcatctctacatcatccggatctacaacttcttcatccagttttacttttaagatcttcttgcttccggaaacagtaacttcaacagcaccgccgcctgcagttgcactgaattcttttgtctccatttcctttgcctgttcttccatctgacgctgcatcttctgtgcctgtttcatcagatttgccatatttcccggcattccgccgcctgggaatccacctctttttgccatgataatatcctcctattcgtcttctacagtaatttccatattaatcagattctccagatccacaaaatgatcttcgaatctgcgtcccgcctccatctggcggacgtctatctctacttttttgccaatcttctgctcgatcagtgactggatctcttctttatgttccggtgttgccaccgcacttgcgctcagttcatccggcagtacgatcagaagcctgttgccttctcctgcactcagtcttgcttttttcagataggttctgagcatcggggaagcctcattgatgatcatccggaaatcttttgccaccgctttcacatcttcgttcaatgcctgcggaagttccggctttggcttcggttctcccgcctcttttgcatccgatgcatatacgatgcgttctctgaccggtgcttcccacgccccctcttcgagctgcttctcgatcgcacggatgcggtccagtaatgcatctttgttctgatccatcgccggacggcacaatttgatcagtgtcacttccagaagtaccctcttctgggtcgcatattttaactggttcgtcagatctgagaaaattcggatgtaacggatcagcgtatcgctgtcgatcatctgtgcttcttcttttaaaagtgcaagattttcagacgacacatccagtacatcttccatattatccgaactcttcaccagaaggagatttcgcagataccatgtgaaatctgccgcaagctgggacagttctcttccctgcatcaccagctcatcgaccgtttcgatcacctgatgcacatccatcgcaagcagctgtcttaaaagccggctgaacacttccgtatccaccgctcccagcacttccagtacatgatcatatgtcagtgtctcattcatatagaacgcggcacactgatccagaagacttaatgaatctcgcatggaaccgtccgccatcttcgcaatataacggaccgccttatcttctacgtcccatccttctttatcaatcagttcccgcagtcttgctgcgatcgtttcaatggaaattctcttaaaatcatatcgctgacaacggcttaagatcgtaatcgggatcttgtgtgcctccgttgtcgcaagaataaatataacatattccggcggttcttccaatgtttttaataatgcattgaacgcaccgatcgacagcatatgcacctcgtcgatgatatatactttatattttccttctgtcggacggtatgtgacttcttcacggatctctcggatattatccacaccattattcgatgccgcatcgatctcgatcacgttcatcgatgtacccgctgcgatcgacttgcacattgcgcactccccgcacggacttccgtctaccggatgttcgcagttgactgctttcgcaaatatttttgcaaccgtcgtcttaccggttcctcttgtcccgcagaacagatatgcatgtccgatacggtctgcattgatctggttcttaagcgtccggacgatcgcatcctgtccttttacatcttcgaattcatccggacggaatttacggtataatgccgtatatgacattctttacactccttgtctaaatgcagatcctgcttaacctgtgtatcttattcatcaccgaagctgataccgatggtttttgcttctttaatgatcgatgcctttggatctacatattttaattttccggcaacttctgacaatggtacacggataatctcctgattctttgttcctaccatacatccaaaatcaccttccagaattgctctcgcagcttctgcaccaagtcttgttgcaagcacacggtcatatgcacacggagagccgcctcgctgtgtatgtccaggcacagtaattcttacttctttatctgttttttcctgaatcttctcagcaagttcatatgcaacagaagggtatttcttctttgcttttttctcttttaattccttctttgaaagcgctgcatcttcttttgaaatcgcaccttctgcaacagcaataattgtgaatctctttcctgctttgccgcgtttttcaattgcttcaactactgaattgatgtcatatggcatctccggaagcagaataatatcggcaccgccggcaattcctgcatgaagtgttacccatcctactttgtgccccattacttccacgataaatacacggctgtgagacgttgctgttgtatggatcctgtcaattgtatctgttgcaatgtctaccgcactctggaatccgaatgtcatgtccgttccccagagatcgttatcaatcgtcttcggaagtgttaccacattaagtccttcttctctcagcatattggctgatttgtgtgttccatttcccccaaggattaccaggcagtccagattcagcttgtggtaagtgtgtttcattgcctctactttgtcaattccgtccttatccggtactctcattaacttgaacggttgtctggatgttcccagaatcgttccaccaagtgtcagaatccccgaaaagtcttttgacgtaagcatcttaaagttcgaatagatcaaacctttatatccatcttgaaatccataaatctctacatcatctcgttttgaaaaaatcccctttacgacgcctctcatcgctgcattcagtgcctggcagtcgccgccgcttgtgagcattcctattcttaacatatgtctgctcctttctatgttgcctgtgtatattactataagccataatagtttatccacattctgtatacaataccagtaaaattataacttatttttatggtggagacaataagggacagaggatttttcatttgcggcaatcctattgacaaaaattcccctgtctctttttccaaaacgtgctataatacatgtggaaaatttgtgtagaaagcaggtagtattgtggataagttagatataaaattgtggacacttgcgtccaaaggccagatcgttcctgaccgttcattactgaagacaccggaacagattgaaatgatcaaaaaaagtgcagaactgaacaccgcagttctcgaccatgtagcagctcatattcatgcaggaatgagcactgccgaaattgacaaacttgtatatgatttcacaacagagcacggaggaatcccggcgcctctgaattatgagggattcccgaagagcgtatgtacttccatcaacaacgtcatctgccacggtatcccaagtgaaaatgagattctaatcgatggagatatcatcaacgtagatgtgtctacgattttaaacggatatttctctgatgcatcccgtatgttcacgatcggtgacgtatcaccggaagccgaacgtattgtccgtgttacaaaagaatgcgtagagcttggacttaaagcagcaaaaccttggggacatcttggagacattgcttatgcgatcaattcacatgcacaggaaaatggatattctgtcgtagaggagatcggcggccatggaatcggtctggaattccacgaagagccattcgtaagttatgttactccgaagggcagtgagatggttctggttcctggtatgatgttcacgatcgagccgatgatcaatcagggttctccggaattctatgtagatgaagacaacggatggaccgtttatacggatgacgacggtctttctgctcagattgaatatatggttcttattaaagaagatggtgtagaagttcttacaaaataatataattttgcattatcgaaaccagatctcacattattatgtttgtataaaaacgtaataaaagattaccggaaaacgcactacattttccggtaatctttttattttctttatttcactattagtctgtttgtatcttctttacaaaattcactattagccggtccatacccattctacaaaatatacagccagtcatgatcctcttcatttctcattcccagtacaagtgccgaatgtggtcccatgttcgcaaccacttctccgtcttctaccagatactcttcgtactctgttgtatatccatctttgtaagaatatagcagacgtttcatgcggcattttatcggaatctctgcttcccatacaggaacttttacttctgcacgttcgctgcggttgttgattacaacaatgatccggtcatgccctttaaatctcgcataagacaggatattttcctctccgccaaggatcttcaacgaaccggtcttaagtgccggatgctctttgtggatgcggatcgcttctttgtggaatgcgatcagttcctgatcttcatgtccccacggataggttcttctgttatccggatctgtaaatccacagacaccagcctcatcaccataatataccgtcggagctccgacccaggtcatctgcataacaaccgcttcacgcataaccgctttattcacatactcgttcgcagcttccggtcccagatgttccacacggccaaccatgtgattcgttctcgttaagaatctggaatgatcatggttggaaagctcattcatcgccacctgaagtgacggagtcagcatgttcgacatgtgatgtgccatcgaaccgataaagttatcgatgttgccaaggagctcttctctcgcctcatcactatgcttttccagtccggtcaggaaccatgtaaccggctccatgaacgcatcatagttcataacggtatcccactcatcccccttaagccagtcactcggatcgccgtaatgttcggcaaggatcagtgcattcggatttgcatctttcacggctcttcggaatttctgccagaactcgtgattgtattcattgctgcgtcccaggtctgctgccacatccagacgccatccatctacattatacggcggcgatacccatttccgtccgatatataagatataattttccagttttacagaatcttcgtaattcagtttcggcagagtatcatgtccccaccagccatcgtaattgccattatacggccaattctccggtccttctttgaagaaacggaagtagcttctgtacggactgtctgccgatacataagcacccggttcataatcctcttcaccttcgtaaattctctcacggtccatccatttattgaatgaaccacagtggttgaacacgccgtccagaatcactttcattccacggcgatgtaattcctccaccagtttaatgaacaactcattacttgcttccaggttcttaagacctgtcgtgcgttttttatacttcgttgcctgactgttgtccgtcacaccattcggaagcacctcgcctccgtcatctacgatctttccataatgcggatcgatataatcataatcctggatatcgtatttgtggttggacggtgacacaaataacggattaaaatatacgacttctacgcccagatcctgcagataatcaagcttatccatgactccctgcaagtctcctccgtagaactctcttacacccatgttcgccggatatttgtcccagttcgttactctctgcgaataatccccaatgtagtaatactcattcgtctctacatcatttgacttatctccgttataaaagcggtctgtaaatatctgatacataaccgctccctttgcccagtccggtgtggaaaatccgggtactacaacaaaattatagtactccaggatctcgcgagagattccacatcgtccataataatatttttctgtcccagactgcacttcgaaacaatatctgaacggctcttcccccagacgtgtctcgaacgtataataatcaaactctccctgtgtgcattctttttccattacatatgtgtcagccgatgtcacaagccctactctgtctacatcatccttcgccgtacggaaccggaatgtcaccagttcgctttctttcggttcagggggatacacatatccttctgttccatcacaaaataaagccgtcttattcatataactaacacctctctcattttttgctctcggaaaggagcacgctttcttctagtcttctgatacatcttccgggaacagcgcttcaaattcttcccgggaaatcttttctttttccaacagaagatctgcgcatgcatgcagaacatcatcatattttctaatgatatgtcttgctctgtcataacattcatcaataattctctttacttcctggtcgatcacagtcgccacgccctctccgtagcctcttgctgtgtgcgccagatcacgtccgatgaacacctcattgttgtcatcatcatagttaataagtccgactgcctctgacataccgaacttcgtaaccatggatttggccaggcccgttgcctgcttgatatcctgagatgcaccggttgtaatatcatcaaatacttcttcttcggctacacgtccgccaagtgctaccgtaatatcctgaagcatctttccttttgtattaaacatctcatccttttccggaagcggcatcgtatatccgcccgcacttcccgtcgggatgattgaaacactgtatacaggtcccacatccggaagcacatggaacaagatcgcatgccctgcttcgtggaatgctgtgattctcttctctttttcggaaataacgcggctcttcttctccgcaccgattccgactttgacaaatgccttttttatgtcttcctgttttaagaatactctgttatcctttgcagccagaattgctgcttcgttcaagagattttccagatcagctccggtaaatcctgccgttgtctgcgcgatctgctgcagattgatctcttcgcttaacggtttccccttcgcatgtaccttgaggatctcttcacggcccttaatatccggtcttccgaccataaccttacggtcgaatcgtcccggacgtaagattgcagggtcaagaatatccacacggtttgtagccgccatcacaatgatgccttcattgacgccgaatccgtccatctctaccagcaactggttcagtgtctgctcacgctcatcgtgtccgccgcccattccggttccacggcgtcttgcaactgcatcgatctcatcgatgaaaatgatacacggtgcattcttcttcgcttcctcgaacaagtctctgacacgggaagctccgacaccaacgaacatttccacaaagtctgaaccggagatcgtaaagaacggaactcctgcttctccggcaactgctttggcaagcaacgtcttaccagttcccggagggcctactaacagtacacctttcgggattcttgctcccacctggatatatttcttcggagacttcaggaaatcaacgatctcctccagttcctctttttcttcttccagacctgccacctgggcaaatgtcactttcttgtcacggtctgtgctcagttttgcacggctctttccgaaattcattgctttcgaattggccccgccgccctgacggttcatcagaccaaagatcaggaacactccgaccagtgtaaggataaccggcagaaatgtagttgccgcccagctgtcctgtggaatatccggcatggtataatccacattctgctctttcaggtaatcctggatctcatttacatcggagacatacagatatctgacattatcggaactgtcatctcccttcagcgtaatctccacgcgccccgtcggaacgctcttgttctgattcacttctacagactcgatcttgtcgttctgaaccagctgttggaatttcttccaggaaatttctttctctcgttgatcgaactgattggtaaaccacagtgctgcgaacaaaaatacgacaaacacgaggaatacaacaccattcagccctctcgctttcttattattcaattttcaggctcctttcttatgccgcgccttattccacgccctctaccactccgatgaatggaagatttctgtatctctgggcgtaatccagtccatatcccacaacgaattcgtccgggatattgaatccgacataatctacttttacatcttttactcttctttccggtttatccagaagcgtacagagcttcatgctctttggatttctcttagataagatgtccatcagataatataatgttcttccggagtcaataatatcctccacgatcagtacattttttccttccagtgtctcatctaagtcttttgcgatcttaacaacaccgcttgacttcgttccgtcaccgtagctgctgacactcataaagtccattgataccggaacggtgattctcttcgccagttcgcacatgaagaatacgccacccttcaatacacagatcagatgtacctgctttccggcataatctttgctgatctgttcgccaagctctttgattctctttgcaacatcctcttcaggaactaatacttttactttctctgccatcttcttctcctccgttaaattctatttccagaattcttctggttttatctgtaacctgatatacctggttctgtctgtatccgatgatccacaggatgtggctgccgtctgctgccagccagatcttctccctgtcttctctcgggactttcacattgacaaaatactttttcaggctctgtgtactgccgtttttgtcaatcgtaatatagtctccaggctgcttatgtcttatttttacagtgctcttaattatatcatagtcaaaccatttcgtgtaggtttttttaggaaatacactggtttgtggtgttcgttccagtatgcgcatctgtaccggcggcttagaattttctccggatttttctttatccttcactttatgaagccagattccttcgtaacacctttccccggtcatctcataaggcagcataatctttcgtccggtctgatgttccatcagttcttccaccagttttacgtggatctgttcaatatcttttttgcgtcctgccgtttcgcacaacagttcatggatcagaaacgtccggacagtctcatttacacttcggaaacccccttccaggatcactactccatctgctttatcttgtttgggttttacgcagtattttctgcatttttccacttcctcttccataaatgcccacactgtccgcatttgctccatcgtatctgccatatgtgaaacagctcttggattaatctctcgttccaggtatgggatcacatgatttctaagacgattccttgtataatggtcttccagattcgtctcatcggtacaatagtctatattattttcttttaaatattcttcgatttcctgtcttcttacccccagaagcggccggatatactttccgtcaaccggactgatcccgccgatccctttaagaccacatccacggcttaaattccacagaagtgtctccgcattgtcattctgatgatgcgccagcgcaatcctcgttccgtttttcctgtgacagacttcttcgaatatatgtcttctgacattccttcctgcctcttcgagcgtcagcttctgttctttcgcatatcttccgacatcttcatgaaaagccagaagttcaacatccagcttctcacaaagggctctgacgtaattctcatctgcatccgcactttctccgcgaagtccgtgatgaatatgcactaccgtcaatccaaaccgcatttccttttgaagttttacaagcatgaaaagaaggcatacggagtctgcacctcccgatacgcctgcaattacatgatctttttcctgcagcatatggtattttttcacatatgccctcacccgttcatacattccggtcttcctttttatctgatttgttttcatattttttcgaaatatataactcttttatttgtttcgatatcatgataaatatatataatttcttatagaaagtcaacttatcggaaagtcagctcacgccccacaggccgatcacaaggatcgtcatatcatccagtggcatttctcccgaatatttcaacacctcacttagaatgcttcttgcaaactctgtcggatttacaatattcgtgttttgaataatatctatcatctgttcttcctgttcttttgccggaagtgcatccagaactccgtccgtcaccatgaccacataatccccggattccagatcacacacttcccggtcaatctcaatattctgtataaccccgatcggaagtgttgttgatacaattttttcaactttatccttctttttgataaatgttgcggccgcgcccgcctttacaaattcacagcttccacgatacagatcaaacagacatacatccagtgtgcagaatttcacttcttcccttccgatcaccagcgccgtattcatcatctgcaccgccgtctctaccgggaatcctgcctctaacagttcttctaacatttctaccaccatcgtactgtcccggaatgcttcttctcccgatcccattccatcagaaagcgcgattcctttgcggcctcccggcagatctttcataagaaaagtatccccagatatctgctccagtccttttccgatccgggcaatcccctgaagcgtctggaattttgcaccttccacacatgcaatggtgccatattcccctcctatcacaagtcgttctccctgtcttgggatcatggttcttcctatacattttcccaccagaaatgcgatatcttttgcaaggattacccgtcccttaaccgcttttaccgtcagatgtacctcatattttccctgctgggtcatataaaatacaatcgataacatctttacattctctttttttaaggctgtttttatacgtttttccagatattcatcctgaaagatccccgcatccagttctctggttgtatactgtatcatctttgcaaagcttgtaagctgtgtggcatatccttctcttgtctgcagcatcctgtgattccacatcaatatctgtttggcattttcaaacacttccagactttcccttaggaaacgcggcgcaagcatgcattgccttttcagtctttttttcaattccatattcagttctgcaccatactcttctgctgcacacatgatttcatacatcatctgatatgttttctcccgcctctcgccgagacacacttcttttcgctcacaaccggcacagacattccccgttactttgtcaaacatttcatcaatttcttctttggacaatgttcctttataatgttccatatttaaaaatgtttttgatagatgctgcagagactccgcaaatttgtccatctgcaccacatatggattcacaaatatttcctgttcttttatccgtgccactttattgctcccctttcgaccttttctttttatttccccgataaacagaaaaaagcttcaggaatctcttcctgaagcttatcatttgttccgagtactcttattttgctttgaaaattatctcattattatgtaccagacccagcttttcttttgccacgtcttctacgtatttgtctgttccgacatatttatctaattctttgatctcttttgaccggtctttttctgcctggatctgctctttcagttctgtctcctgcgcctgatattctctgttcttcgcctttaacgtcatactgttcgcagacaccataactgtcagcaaaagaacaacagcactaatcgccagcacacttctcttatgatcctgagaacgcctgcactgccgtcttctgcggtttctctgttttacatctttcatcttattttactcacccttgtttgacatctctgtcattccactcacctgttaattgcctttattctatctttttttccggcctttttcaagtgtttcatccaaaaacccgctccccggacatacaatttttcgataccacttcctgacagccactagaaaaaccgacatagctgatgctccaagcccaatacctagtacaaaataccaccttacactaccactacttgtgtagtaaatctgcacaaacaaaaaaattgcggttccgacccagtatgccaggtcttccagctcaatgatccagtgcgtatgatgtatcacatttcgcagacagcttatgcagcggtatacaagacgtacaattgctccggacaatattgcagaaagaaatataaataattcttttgttattcccatctcatatttccatcccgtttcataaatttcaccggatttctctccgctttttcagcgaaacaattttccaaacagactttccgcctgttttccgggagactgtatatccgaataagagatactttcaatgttgccggacagatcaatctctcccttttccagattcacccggtttacatgcagatccgtgccctttaccatgagcattccctgctccgtctccaacaatatctcattcagattaaaagacaggacatccaacactccggtcaccagtccggttttccggttatttaataccagtttatggcttttttgtactgctgtggtctccaaacctatcacaacctttcttactaatcatatgaacggaaatcacaaattatgacttttcatatgatcacttaagaaaggttgtgctgatctgctgatttttcgcaggctctttatttattttataaatatttgaacaggtctcctgcctcttctttttttgtcgtatccttgatatcaagtacttctacttttacggttcttgttccaaactggatttctatgatatctcccggttttacctttaccgatgccttggccggcttgtcattcaccagtacacgaccggcatcgcaggcttcgttagctacggtccggcgtttgatcagtctggaaacttttaaaaatttatctaatctcatatctttattctcctgcatactttggtatctacagtgcctgtaggttgcagcttctttcgaacgcataacgattgaaaaaaccggagggcatcaagatactctccggcataaaatacatttataaatattacaattcagactactcgttgatagcatcctttaatgctttaccagctttgaattttggtgctttacatgcagcaatcttcatagtctcgcctgtctgaggatttcttccttctctttcagctctcatgcttacttcgaaagtaccaaatccaacaacctgtactttatgttctttctttaattcttctgtaacaacatcgataaaagcttttaaagctttttcagagtctttctttgataattctgcctggtcagcaattgctgcgatcagttctgtcttattcatggattgttcctcctcttatttacatttagaattcacgatttcaattctttttatacaaagtcaacgtccatacccgtcatatggcatgcctttatgtactgttatacctgttttcactgtgaatgtcaaggtaaatcccccgtttcccctgtattttcaagctttttcgctattttaccatacctttaaagttcaaatccaaatacttcttttaaaaacatttttttctcttctgtctgccttatcgcagtctgaagcttttctatgttttttaccgatatccatgctttatttgtacaataatacgaattggccgttttccagaatttttccggatagatcagacggatcttcagatattccatttcgccctccgtaagcggatgtattgccgaataggcattcagcatgccatcacccaggcggatcttccatccacttttttccagaaccttcctgaggaaataatacagatcttccacctgaatgtccctgcggaatttttcaaaattggttgtggcgattccttcttttgtcataatgatattatgataattatactctccatgtatcataccggacttcttcatctcttcggcatacagtttctcataatccgaccgctccagttcttccactgctgcctctgcccattgatacatctgatcaaactgcttcaaaaaggcaaattcaaactcacccttgggaacaacttttcttgtaaactgccggacctttttcaattcacgattatgccgtctgtatttttcatctgttttggttccttccggtatcccatgttccagttcataacgcataatgatatgtagttttgccagatttcccgccgcttcaaatatttcccttgtcttcttaatgtcgcattcacgtccggcaaaacatttctttaatatgtaccggtctccgttatccaatgcagatatatattcgccgttacggttcgtgaccacataatcgatcctatgatacccctgctcataaagccgtgtataaagttcacataacgcagggattctcttctcagatgttgtaatctcctttaaaaggaataatcccttatttgtttcgcataaaacagcacccctgactttgcgggtgctgcttacttctatatcatattgttccagtattttttgttcaaattcctgcatttatattccccgcgctttacacttgatattctttttaaatgtatgtgggaaatataaaaaatattcactgctgttatacttctttatccgggaaactatatttcagcaggatctctttggtgttcatttccggattctcgatcacaaggttcaataattcgtttaacttttcccctatctcttttcccggcttcattcccgcccggatcagatctctacctgtcacagctaattcttttaatgaaacacactggcctttttctataatctctgcatatgtctgttctacttcatcgaggttttttaatttttctgctctctggtactcactttgtgccagaacatctgctctccttacttccatatagtatgggaaaatgtcttcgccgatcttattcattgcccttctgacatttttcggcacggccggcatgcggtaatcatgattcagcacaagtcttgtaaccttatgcagcgtatcattatcgaactttaatctccgaagcacttctttggcaatccgctcgcttcctaatgcatgcattttaaaatgcgccacaccgtcttcatccatcgtcttgtattccggtttacctgtatcatgcaataacattgttaatcttaagatcttatcattgcggacattcatcatcgcatgaatggtatgttccccgactgtgtacatatgatgcagtgtttcctgctttgtctccatcatacggtcaaattccggcaaaaataccttcgtaatcccaagttcataagcagttcttataagctccggccggtcagatgtcagcatcttcaccagttctacctgtatcctctccgcactgatattttccagtgtcggcgcaagaagcttcattccttctttcgtctcctcatcaatctcaaatccaagctgtgccgcaaatctgacgcctcttaaaatccggagtgcatcttccgagaaacgttccctggcatttcccacacagcggatcatatgcttttccagatcctgcattcctccaaagatatctacgatcccatccttgtcattgtatgccatagcattgatcgtaaagtctcgtctgagcaggtcttctttcagatttcttgtaaatgtgacttctttcggatgtctgctgtcttcgtattttccatcgattctgtacgtcgtaacttcgtatccttcatgattcaaaagtacggttatcgttccatgctcaattcccgtatcaaatgttttgtcaaataatgcctttgtctcttccggcattgctgatgttgtaatatcccagtcgcccggttctctgccaaggatggaatctctgacacatcccccgactgcgtatgcttcaaatccatgcaactgtaaggtatgaatgataaactgtacatcatccggtaattttatattaaagttattcacaaatatttcctccgtttatccacgttatcaacattctatatcataccatatttttgccggtgactgttgataaaaaatggacggtagattcctaaaatccaccgtccattacttataatctctttattcttagtatgattttccccagtaagccatgtgtttcgcaggttttccgcaatagatacatttatcggaaataaactcttcatcttcaatcagacatcttgttgcagctccgcctgtctgatattttacttcgccctcacattccggatctccacaccagcatgcttttacaaatccacggttggctttgaacttctcaaccatttcatccattgtagtagctgtatcaatgtggctgttcaggaattcttctgctctgttgtacatatcctgctgctcctgctctaagatctcgcgcagttttactgcgatctcatcgagagatacaacgatcttttcacggttatcacgacgtacaacaacaacctggttcttctcgatatcctttggtccgatctcgatacgtgttgggataccaaggatctcctgctcagagaatttccatcctgtactcttatcagagtcatcgatcttcactctgtatcctgcttttttcagttcgtcaagcagtgcataagatctgtcaagcacgccttctttgtgctgggcgattgggatgattctacattcaaccggtgctacgtgtggtggcagtaccagtccgtcatcgtcaccgtgaaccatgatcagagccccgatacttcttgttgaccatccccatgatgtctcatacgcactgtgcagttcgttgttcttatctacatatttgattccgaatgcatccgggaatccgtttccgaagaaatggcttgtcgcagactgaagtgcttttccgtcatgcatcagtgcttcgatcgtgtatgtgtcttctgctccggcgaatttctcgtgttctgcctttcttcctgctacgaatgggatagccattgtctctttatagcaatccttataaacttcccacatctggattgttctttcttcagcttcttcatatgttgcatgaagtgtgtgaccttcctgccataagaattctcttgaacggaggaatggtcttgttgtcttctcccaacggagaacggagttccactggttccatacctttggaagatctctgtatgattttacagtctttgcccagaggtcacagaacaatgtctctgatgtagggcgtacgcataatctttcctgcagtctttccattccaccatgtgttacccatgcaacttccggtgcgaatccttctacgtgatcagcttctttttccagaagtgactccggaatcagtactggcaggtatacattctcaactcctgtttctttgaaacgtctgtccagatctgcctggatcagttcccagattgcataaccgttcggtaagtagttcatgcatccttttacgcttgaataatcacaaagatttgcttcacgtacaacgtctgtgtaccactgtgcgaaatcttcgtcacgggatgtaatgtttttgactaatttttcctttgccatgtttctcttctccttttcaattttggtgaaatccttattccacgttatttttttgccgggagttccacaacctgacaattgcttctgtatgcgaatgtctcttttaaatgcatcgcacaaaaaacgccgggcctttcgactccccgaaaaagggaccgaaaagctcggcggtaccaccctagttaactgcgaccctttcgcagctctcttcattggccgttaacgccggctgacacgctgcactttcatgcagtggctccaggaccggttccatgtgatgaacagcagatatctcacaccatatgatatcctctctgcggctggattctcatgtactaattcccttcatcgccataaaaattttttttgaattgtcaattattttaatccatgaaatatgttttgtcaagatattatctctatctctgcttccgccaatgtctgcttgcagttttttcccctccatgatttaataagtatatcatttgtcttaacaaaggagaagtatatggctactttaaatatattatatgaagacccacacatcctcgtctgtgtcaaaccacatggcatagcaacccagagcaaaagcatccgttacccagacatggtcagcctgatcaagaatcatctggcgaaagcttccggcacttccggaaaatccggtgcaccaaaatccattggttccagaacccctggctctgctgagccttaccttgccgtcatccacagactcgaccaacccgttgccggaatccttgtctttgccaagactccggctgctgcaaaagatctgaataagcagttacagaatctgggattcgggaaatattaccgcgcgcttgtcaccaatgcgccttccgaggaagaaggaacactcgaggattatatggtcaaagatgcccggacgaacacttcccgaatctgttctgcaaaggaaaacggagcgaagattgcacggctgcattatgatacggttcctgaccatggccggttgttttcaactgtttccggcagctcttcctctgttgatgtctctctgtcttcgcaaagtcaggaatgtcacgagaccgaacttgagattcatctggacaccggacgtcatcaccagatccgtgtgcagcttgcctccattggatgcccgatcgtcggagatacaaaatataacccggagcttaccggcaataaaggatggcagacaatccgattgtgtgcttataagctcgatttcaaacatccggtcacacacaaggcgatgcattttcaattagaggccgatccggcataattcaattatcctaaaaagaggagcgggaaattcccactcctctttttcgccgatacatatgccctctatgcttctgctacatcctcagtcagagcttcttcatatttctcaaggataatattctgaatgcgctctcttgttcctgagttgattggatgcgcaatatctctatactctccatccaatgctttcttgcttggcattgcgataaagagtcctttttctccttcaatcaccttaatatcgtgtaccacaaattcctcatccatggtaatggaaacgacagctttcagcttgccctcctttgctactttacgtactcgtacatctgtaatctgcatgttgttctagcccctttcttctagcctttgcactgctttttcttaaagtgcatacctctcatttttttctacgactaccttcacaccattttcaccaacatagcgtgtgtttgcccggatcgtatccctgctttctacaatacagttctcaatatatgcattgtctccgagatagacatcattaagaataatggaattcttaatgacacagttgttccccacgaatgtcttcttgaaaagaatcgaattctcgactgtaccattaatgatacttccactcgccacaaggctgttcttaaccatagatcccgggttgtattttgccggcggcaagtcgctgaccttggaataaatacccggctgtgtccggaagaaatactcacgtacttccggtttcaggaaatccatattcgtctgataatatgcatccactgttgaaatgttgctccagtaatcttttattttataaccgtagattttcttcagattcttatatctgataagaatatcggtcacaaaatcatgtctgtcatcttctgcgcaatgttcgatcagatcgatcagctgacgtcttctgattacatagatacctgttgatacaatctgcgactgtgccaccatcggcttttcctcgaactcttcaatacgcatcgaatcattcatcttgatcgttccgaaacggcttgcatcttcgttcggaccaagttctttgcataccactgtaatatccgctttctttgcaatgtgatattccagtactttgttataatccatcttatatacagcatcaccggatgtaatgattacataaggttcgtgacatctctttaagaaatccagattctgataaattgcgtctgctgttccgcggtaccagtatccgttctccgcagtgatcgtcggggtaaatacatataatcccccctgctttcttccgaaatcccaccattttgaagaattcagatgttcattcaacgaacgggcattgtactgtgtcagaactgccaccttctgaatatgagagtttgacatattactgagtgcaaagtcaatcgctctgtaacttccggcgatcggcattgctgccactgctcttttatgtgtcagttcacgcatcttattgctgttaccacctgctaaaataattcctactgctctcatgctcgttcacctgcctttatcaatgtttctccactttccagtactccattcgggtaatcttctttggatgttactccactgatagcagtgttctttccaatctgcaccccatccggtattacagatttttcacccacggcaaccaggccaaatgaataaattgccggttttaatttgttcggtatatcacttccgatgccaaatgtagtattatccccaaccaggcaattttctgcaatgattgccttgtccatgacacaattcttaccaaccctggtatctttcatgataatagaatccctgatcacggatccttctcctataacaactccggatccgataatactgttatgtacttcaccatatacttccgcaccgttacagataatacttctctcaatcactgactgtgccgaaatatactgtggcggcagaatctcactgttggtatatatcttccagaattcttcatataaattgaactccggtatgatatcgatcagttccatattggcttcccagtaagatcccagtgttccgacatctttccagtaaccgttatattcatatgcgaacaatctctcgcctttattgtgacaatatggaatgatatgctttccgaagtcacaaccaggctcgtccttcaatgtctccaacgcttccttcaggactttccatgagaatatataaattcccatagatgccagattactctttggttccgcaggtttttcctggaattcctgaatccttccatcttcatctgcgataacaataccgaaacggcttgcctcttccatcggcaccggcattgccgcaatcgtcacgtctgcgttattcgccttatgataatccagcattacttcatagtccattttataaatgtgatcccctgataagatcagtacataatccggatcaaactgctccatataatccagattctgataaattgcgttcgcagttccggaataccattcactgcttccgcttctctcatatggtggaagaaccgttactcctccgtaattcctgtcaagatcccaaggaataccgattcctatatgcgcattcaatctcaatggctgatactgggtcaatacacccaccgtatcaattcctgaattaatgcagttgctgagtggaaagtcaataatgcgatatttacctccaaatgcaacggcaggttttgcaacttttgctgtgaggactccaagtctgctgccctgtcctcctgccagcagcattgctatcatttccttctttctcatgtcatcaccccttctcagtagtcttgctttttctattataccatacttcttcttacgtagctaacaatttttacagttttttttcgattttcgcaaactttttgttaaattattacaaaaacttacgacttggattttttttaatatatgtttataataatatgaagaacatgtagtttttatgatgatctttttacctatattattaaaaaggatggtatattatgtataaaattaattttgaaaaacctgtacacgtacactttatcggaatcggcggtatcagcatgagtggtcttgccgagatacttttaaaagaaggtttcactatttccggatctgataataaagaatccgctctcacagatcatctggaaaagctgggggccaaagtattctacggacagaaagcttctaatattatttccggcatcgatgttgttgtatatactgccgcaattcatcctgataacgaagaattcgcagaagctgtaaaacagaatcttcctatgctgacccgtgcagaactgctcggacagttaatgaccaactatgatgtaccgatcgcaatttccggtacccacggcaagacaacgacaacttctatgctgtcacacattttacttgccggagaaatggatcctaccatctctgtcggcggcatcttaaaggctatcggcggtaacatccgtgtaggtaattctgaatattttgtcacagaagcctgtgaatatacgaacagtttcctgcatttcttcccgaagatcggcgtaatcctgaatattgacgaagatcatctggatttcttcaaagacctggctgatatccgtaattctttccaccgctttgcgaaattacttccaaaggatggaacacttgttatcaacgacaacattcctgatcttgaagagatcactgctgaccttgactgccgcgtgatccgttacggtaatgacagctctcttgactacagtgcaaccaatgtccttcatgataagaagggagaggcctctttcgatctggtaaaatccggtgaatttatcgaccgtatctcattatcggtgaatggagatcataatgtatccaatgcattatcagccattgccgttgcagaccttctcggagttccatttaccaagatcaaagaaggactgaaatcgttccacggcacagaccgtcgtttcgaatataaaggtgaagttaatggagttactgtcattgatgattatgctcatcacccaacagagatcaatgcaactttaacagcggccaaggaatacccgcacaaagaaatatggtgcatcttccagccacatacttatacacgtaccaaagcattattccctgaatttgtagatgccctgacacatgccgatcatgtgatcctcgcagacatctacgctgcccgtgagacagatactctgagcatgtcttctgagatgatcgcagaagaattaaagaaaaaaggatgcgatgcttactatttcccaagctttgaagagattgaaaacttctgtctggacaagtgccagaagggagatgtgttgataactatgggagccggaaacgttgtaaacattggggaaaacctgcttaaacgctagttatccacattatccacacaattttatccacaaaaaagtcggattttgactcaaaaatttcttttttccccgtcttcccggtgctataatgtgtctacgatgaaacgaaagatacaaaaagttctggggaggacggggaattattatgaaggaattaaaacttacgaagtatgtacagacgaacgcgactgtactggacaatgaatttatcgaccagtatatggtcagagccaatggagaatatgtcaaagtatatctcctgcttctccgtcatatgaatcagtcctccggatgtctttctgtttccgagctggctgatctgctcgagtgcacagagaaggatgtactccgcgcattaagatactggaagagtgaaggactccttgattatctggatgacactccggatgatccgactccgcaaagtacggtccgttcatccgtaccaacttccgaattacacgatgtacagtccggctatatgactgcgtccgttccatctatgacaaatcagatggattaccctgttgattctgtcgaagcccctgtttctgcggttccggcatctacaacaaatatacagcagtaccgtagccgtaaggaacgtgcagaattcaaagaattactctttgttgccgaacagtatctcggcaagacactttccgctactgatattgaccagattacttatttttatgacacactgaatatgtcagctgaacttattgagtatctgatcgaatattgtgtcgaaaatggtcacaagagtatgcattatattaataaggtggccttatcatggcatgaagaaaacataacaactgtgaatcttgccaagacaagttcatttctttataataagaactgttattgcgtcctgaatgcatatgggattaagggccgcggtcctgccgcttctgagattgcctatatccgcaaatggtcagaagaatatggttttgctctggaagtaatccttgaagcatgtgaccgtacgatgaatgccattcatcagccaagctttgactataccgattccattctgaagcgctggaaggacaagaatgtccgtcagttaaaagatatcgatgcggtagatgctgattatcgcaaagagaaggaacgtgcgaaagagctcgcaaaggaacgcaaaagacagcaacaggcacagaagcctgcaattaaccagaacaataagttcaacaatttcgacggacgttcttatgacatgaatgatctggaacgtcgtctggttcagcaataaagtatacatatcagattctattatgcgaatgcagaggagttttccataacatggcactttccaattctcagtacgatcatttaatgcgtacttatgaacaaaaacaactggataatgagtttcaactcagaaaacgctatgagaaggcatacgccctcattcctgaattagaggaagtggatcattccatctcctctttaagtgttaaaaaggcaagactgcttctggacggagatcagactgctctttcttctttaaaatcagagatcaaagaactctccgccagaaagccggctttattaaaagcacatggtcttcctgccaattaccttgaattacactatcagtgtccggattgtaaagataccggttatattggcacacataaatgtcactgtttcaaaaaagcgattgtggattatttatatacgcaatctaatctcaaagatatccttgacaaagagaacttttcaacctgttctctgtcctattattccaggaatcatatcgatccgcttaccggacgttcttctctggaatcaatggaaactgcattaaatgtctgtcacaacttcgtagatacattttctaaagaatttcataacatactactgtatggagataccggtgtcggaaagacttttctttctcactgcatcgcaaaagaattaatggattccgcttattccgttatttactttacagcagccggactttttgatatccttgcagagaatacatttggtaaaagacaggacaaggattctgatgtatttgaacacatctatgactgtgacttgctgatcattgatgatctgggtacagaactgccgaattcatttactgtatcccagttgttcatttgtctgaatgaacgcatattaaggcagaaatcaaccataatatctaccaaccttgcattggaggatataaaatcaatctactcggaacggacattctcacgaatcagcagtaattatacaattctgcgtattaccggtgacgatatccgtatccaaaaaaaattattaaacctgggaggtactaatgatgttacgccgtaacgatcgtaatcttgagaatataccggtaggagcacttggactgatcgctcttgacggttgtacagagatgggagcaaaagtaaatgattatctcgtaaaatggagaaaggaagatggacatattcataagaacgatgtcgctttcataggctatgagaaagacacttacttaatcgatgcaaaagttccacgttttggttcaggtgaagcaaaaggtattattaatgaatccgttcgtggtaaagatctttatcttatggtcgatgtatgtaactacaacctgacatattccctgacaggaaatattaaccatatgtcccctgacgatcattatcagaacttgaaacgtattattgcagcagtaggtggaaaaggacgtcgtattaacgtcattatgccattcttatatgaaagccgtcagcacaagagaagcagtcgtgaatctctggactgcgcactcgctcttcaggagcttgtccgtatgggtgttgacaatatcatcacatttgatgctcacgatcctcgtgtacagaatgcgattccattaaacggattcgaaacaatccgtccgacataccagttcgtcaaaggtcttctccgtaccttcaaggaccttcagatcgacagcgatcacatgatggcaatcagcccggatgaaggtgctacaggacgtgcaatttatcttgccaacgtactgaaccttgatatgggtatgttctacaaacgccgtgacttctcacgtgtggtagacggccgtaacccgatcgttgctcatgagttccttggatcttccgtagaaggaaaagatgtgatcatccttgatgacatgatttcttccggtgacagtatgttagacgttgcccgccagttaaaacagcgcaaagcaaaacgtatcttctgcgctgctacattcggtctgttcacaaacggtctggagaaattcgaccaggcatatgaagaaggtatcttagacgctgttctgactaccaacctgatctaccagacacctgaacttctggaacgtccatattatattaactgtgatatgagcaaatatattgccctcgtgatcgacactcttaaccacgatggttctatcagcagtatcctgaatcctatcgaaagaattcagaatgttgtcaataagtataaaaatggtgaagagatttaatagtatctacaggacctgccacgggcagctccttacgaatgcacgtgattaaaaaatgctgccgggaatttcccgacagcatttttttaaagttctatcttgtgataaacaagtccagcttctttcatcacctgttcttctctcgtctgacaggtaaatatgatcacttgtttcttatgttctttcaaccatctgagtgtctgaagcattctctcctcatcataatatgcaaatgcatcatccagtatcaccggcatctcttcctcacataaaagctctcccactgccatacggagtgccagatagacctgttctaccgttccacgacttacctgttcaatctctactctcttttcatctgtcataagcgatacatgaagtttttcatctgtcacaagctttttatattttccacctgtgatctcacagatgaataatgacgctttctcattcagatctctttttagatatccccgcatctcctctgacagctgttccagatgatctgccgccatctggaccgcctggcgtttcatctcatattccctggaacgctcattaacttcatccagttccgcgagctgttctcccaggttgtcatactgaattttcttctcttttaattccgctgtaatatgcgatttctcccagcgtaacttctctatcggaactttctcctcttcctgcgtgatctcttcaaggataatctctggctctgtttttacctgtttttttccaactttcatccggttccatatatataagccgaacgcaaggaataacacaatagcaatcagataattccacggtttcgagaacaagatgactgcaatcacaataaccagtgcaaacaccagaagctccattggatggatcctccatttttccggacgaatctcatccatgacaccttttccatgttcttcttccctctggcgctcttttttcttttcttcttccttttccagccgatacgcaagttcttcttctacacgttccagttcttcttccagatgatgtacatcacgccagacaaaagatacttcctgctcaagtttttcacgtttctgctgcttttgagccatttccatacggatctcattttccaggatcttcttcctgccccttaactgttccaatgcaccggccaggtcgatttctccgtttcccgaggtgtaatagtttgtcgcataatttttcagctctgccacaatactttcccccatctgtgcattcctctggctcatggaaacggtattatcgtaacgttctgcgtccatctccccaagcagcatctgaagatctccgtcttctacagacagtacttcaccgtcctcttcacagatcagttccgcttttttagaatatttatcaaaatttctttcgatacggaaatgtttctctccacttttgaacttcaatataccagaatagtaattaggatttccccacggttcgtatatactgaaagtatcattttgcgcggcccgtcctctccctctttctattccgaaaagcattcccctgatgaatgtgtggattgtagactttcctgattcgttttccccgtgaatcaggttgatcccctcatccagatctatctgccggtcatggaattttccaaagttttttaacaataattcattaatctgcatctttcggttctatcctcttctcgtctccatcaaagcctgcactccttcacagagtgcctggtactccagactgtcggccggatagccactcaggctttcaatatattgtccgagaatgtttcctttattttcattttttaatttttcaaagtcatatgcaggctttgtatggtctgtaatctccaccacattaccgtatggatccatatgatccagctcataccagatatccggatctcgataaccagtcagtgtaatcttatacatgttctgctttccctgctcttcgatcatatctgcaatcttttgcctcagtacatggccggtcacagatttatccacctgtacctcgcagtgtctgtattcacgcagtgcatgtggcacaaaacggatctgacaaccatttccggtaatctttccttcgatataaccatgagctcctgtatcacctacatccgtcggctccagcgatccggcatatgccatccggttctccaccagcatctgcggcttgtggatatgtccaaatgcagcataatcatacccaagcgtcatgatctgactactcttgatcggaatatgtttctcatccccgccgtgtgcaagcaaaatctcatacttctgccgtccttccggaactgcatgatcatataacggctccagaatttctctggaatgataactgcatccatagacagccgtctggatccggtcaagttccacacagctcatttcctgcgagcagatcatgtgcacatgcggtgcccaggtaaatgttcggtaataagagtttttcctgatatgatcatgattaccggcgatcataacaacttctgtctgctccagcatctccagtatggaattcatttcttttaattctcttaaaagtggctgcctgtggaacaggtcccccgcgatcagcaacaaatctgtctttttctgattgcagattgttatgatatcacgaaagctgtcccagagctcctgttctctattttgactgtacgcgtttcccgcgtccggctttgcccctaaatgcaagtctgcgatgtgtatgaacttcatcctcgcttccctctttctgttctgtcttctctttcgatggcagtgttacgacaaactgtgtccggttgtcatcactttttgccaggattcttcctccgtgcagctccacgatctgtttggcgatcgcaagtcccagacctgcgccgccggttcctgtcgatctggaaccatccacgcgatagaatttctcgaatatcgtctgaagcatatcgcccggaatcttatcacctgcattggtaaatgtgatctcgatgtcaccatccttcattttcgcttcgatccggatctccgtatctgcatagcagtaagcaattgcatttcttaagatattatcgaatactcttgcaagcttatccggatctccgtagatcatcagatcttcttctacatccacttcacaggtcagcttcttttcttggaggactccgtacagctcatctgcaagctgttcaagcatcatcgtaagatcaatctctaccggttccagttcgatattctgaagattatatcttgtaatatcaaaaaattcattgatcagctctcctaatcggatggatttttccaatgcgatgtgagtatatgcttttcgttcttcttccggcatgtcgggatgatcttcgagcatcgtaagatacgccacgatcgaagtcagcggcgtcttcagatcatgcgccagaaaaagcaccaggtcgtttttcttcttttcgccttccgatgcctccagctcctgccgttttaatgttgctttaatctcattcaaacggatctctattggttttaattctgtgatcagatgaatgggatctgtagattccgatataatattttcaattccatgatcgatctgatccagatattttgtcatctgagaaagcgcaacataaaaaaacagcgcaaaaaggatcagataaccaacaatcatgaaaaatgtcttgttatctccgatcagctgccagtaaagatggaccgccgtcttttcatttatattcagaaataccagaacatctacaaaagttctggcaaaactgtcattataaattccatcgatcacaaacttaagcagtacccctcctaccagaacggtaagcgctgtgaccagcaccgtctgcaagaggatactgaattttaatttccgataattattcttcaaccttatagcccactccccacacagtcttgataaaatcagacttgcctgtcggtgcactcatcttctcgcggagatgacggatatgcaccatcaccgtgttgttactgttcttataatatttctcatgccatactttctcgaacaattcttctgagcttatgacctttccccggttctcacacagaagccagaggatgtcgaattcgatcggtgtcagtgtcagcggcacttcattgtatacacactcatgagaagtccggttcagaagcagccctccaaaatccaggacatctccttcttctttggtcccttcattatactgtgtacaccggcgaagctgtgctttcactctcgccaccagctccagtgggttgaacggtttcggaatataatcatccgctcccagcgtaagcccggtgatcttatccatgtattccgtcttcgccgtcagcatgatcaccggaaatgtatatttctgccgaatctgcttgaggatctggaatccgtcaatatccggaagcataatatccaggatcgcaagatcgatcttcgtactgttaatacagtccagtgcatcctggccgttgtaaaatttgaatactttgtattggtcattctggagataaagctctactacatcagcgatttccttctcgtcatctactactaatatattcatactgccctccattctatatggggacggcggatttttataaatcccccgtccccatatacgttttatatacgtttttcacgtgttgttatccacatgatcctctattacagttcacagttgttgacagttcttgggaatggaattacgtcacggatattgcccattcctgtcagatacatgacgcatctttcgaatccaagtccgaatccggcatgtcttgtagaaccatatttacgaagatccatgtagaacttgtagtcttcttctttcagtcccagttcatccattcttgctttcagcttatcgtagtcatcctctctctggcttcctccgatgatctcaccgattccaggtaccagacagtctactgccgcaacggtcttgccatcgtcgttcagcttcatgtagaatgctttgatctccttcggataatctgttacgaataccggacgtttgaagacttcttctgtcaggtatctttcgtgctctgtctgaaggtctgttccccatgttactttgtattcaaatttatcattgtgtttctcaagaagttctacagcctctgtatatgtcactcttgcgaaatcagaagatactacgttgtgcagtctctccagaagtcccttgtctacgaatgaattgaagaagttcatctcttccggtgcattctcaagcacatagttgatgacgtattttaacattgcttccgcaacgaacatatcgtcatccagatctgcaaatgccatctcaggctcgatcatccagaactctgccgcatgacgtgttgtgttagagttctctgcacggaatgtcggtccgaatgtataaatattgcggaatgcctgtgcgtaagtctcaccatttaactgtccgcttacagtaaggcttgtctcttttccgaagaaatctttggaataatctacgcttccgtcttcattcttcggtacgttattcagatccatagtcgttacctggaacatctctcctgcaccctcacagtcacttcctgtgatcagtggtgtatgcacatatacgaaacctctctcctggaagaacttatgaatcgcatatgctgtcagggaacgtacacggaatactgcctggaatgtatttgttctaggtcttaaatgtgcgattgttctcagatattcaaagctgtgacgtttcttctgaagtgggtaatccggtgcggatgctccttctacttctacagtatctgcctggatctcgaatggctgctttgcctgaggtgttgctaccagtgtacctgtaacgattactgctgcacctacatttaacttggagatctctgcaaagttgtccatcttgtcgtgatatacaacctgtaaaggctcaaagaatgttccgtcatttaccacgatgaatccaaatgctttggatccgcggatacttcttacccatccaccgatggttactttctgatccatgtaagaatcactgtttttatataattctctaattgttgtcaattccatgccaattattctcctttttaaaaactcacatatatttctattataccatatcagccagatttatgttatactatatttactgaatttactatcttacttatccgaatttttcagttaataagtcagatggaagaaatatcaatcaaaagttaggagatcatcatatgaagaacttactagttgcacagtccggcggaccaacttctgcgatcaacgcaactcttgccggagtaattgagaacgctctttccagcccatccgtagacaaaatctatggatcagtcaatggaatccagggagtattaaatgagaacctgatagatcttaaaaccaaaatcacaaatgtatcagaactggaccttctttgtcagacccctgcttctgcacttggctcctgccgtgtgaaattaaaagatcctgccgtatgcgcagatgaatacgagacaatcatctctgttctgcgcaaatacagcatcgactgtttcatctacatcggtggaaatgattccatggatacagtagacaagctttccaaatatctgaacgacaaaggaatcacagacattaccgtggtcggcgcaccaaaaaccatcgataatgacctctgcggaacggaccattgtccaggttttggatctgcagcaaaatatatcggaaccacatttgccgaactggaacgtgactgccacgtatacacaaccaaggccgtaacaatcgtagaagtgatgggccgtgacgccggatggctgactgcagcttcctgcctcgcccgtgcaaatggtgcgaaaggacctgactttatctatctctgcgaagtaccattcagtattgacacattcctgaaagatgtgaaagcaaaactggaagaacaggatgccgtgatcatcgctgtcagcgaaggtgtgaagaacaaagacggtcgctacatttccgaagaagtacagagctccgctgtcgattccttcggccacagctatatcgccggtgccgcaaaggttctggaagatgctgtaagaaatgagatcggatgcaaggtacgttctatcgagctgaacctgatgcagcgctgcgccgcacaccttgcaagtgcaaccgacattcaggaatccagaatgctcggaaaggctgcctgccagtatgcacttgagggtgcaggcggtatgatggctgctgtgatccgcacttctgacaagccttatgctacggaatttaaagcactcccggtatgtgatattgcgaatgcaatcaagagtgtgcctgcagattatattaataatgcgggaaatgatgtaacggaaaagatggtggattatctgacaccgttgattcagggagagatgaatacggtgtatgagaatgggattccgaagtatatttatttgtattaagttgctgttgaatttagtatcatggacctgggtaagccacgatgatgaattaaacggcaaattcccacacttgatttttactcttccgcatgctatactatcacccgtcacaaagcccacaaaaccaaggtcgaacagggctgaccgccgctttccggcgttaaatgaagatccgctacggcgcgtgtgttcgtgaccttccacacgtaaaacaaaactaaaggagaattgaaaaatgaaaaacaaaaatcttagtttcatgacccaggcagccatgatcgctgcgatctacgtggtgttgacttacatttttgcaccattttctttcggagaagtacaggttcgtatctccgaggcactcactattttaccaatatttacaccagctgctattccgggactctttgccggatgtctgatcggtaatattctgggcggtgcgatccttccggatattgtatttggcagtattgcaacattgattggtgcattttttacatggaaactgcgtgagcagaaaccagttgtagcaacatttccaccaatcatttcgaatatcatcatcgttccgttcgtactgcgttacggttatggtgtaacacttcctattccgtttatgatgctgacagtcggaattggtgaggtgatttcctgcaccgttcttggtctgatcgtgtatggggcattgaagaaatataagagtacgcttttccgtacagcctaaaaaagtggcgtgtgaaaaaacaaaagttttttcacacgcccttttttattattcattctgtattctctattatccaatatacgtattaccgcttccggacgtcatctgatccatctcttcatacttcacgctgtgtcttgtactgtcattcagatcttcatacacaacattcgtatcgctgtatcccaccagaatgacggcattctgcgaatccagcattgcaatgaccggacggccctggttgatgatgtacagaatctcttccgtcgtacatcctgtcaggtcgtaagcctcgccgttattgacatcttttaagatatcaatcggtttttcctgattcttcaggcggtctttgattgtatttaacacatcatctttatcagtgatcgaatactgcagattgcggttaccgcgctcccatacataattctgggatgaatcgactaccacaccattgtaatcatttgctttcttgatcgcgtctccggcctttgtatatacgccctgtatatcaccatgtccatagacataatatttctccggtgcgtctttatcggaaaatgtgattgtctgtggtctttcgaacagaatctgttttggcttgagcacttttggttctttgtctgcgactccgtcgttatacgtcagtcttacctgtgtctgtttcaggtctgttgcataagtttccagtgcgatattgctcttggtcttctgttcattattcgtaatataatccggtgctgttgctgtataagtatctccgtctttcgatgcacgttccagcgtgatcatatcttcatcgaatgatgcactcagaatataaatgccgtctgtctgatattttttgatcacttttcctttttgattccagatctccagtttgtacattggaacggttgcctctccggatacggtatttcctatatcctctgtcttggcaactccatatacaaaatcacttctgacaaatccaagtgggcggatgcattctccttttccgcaggttactttctgcttctttcctgtctctacattcaggattgtcacttttgttgcggtctcaagatctccgtttgcctgatatgcgatcagacttccgtcttccgacacaacatactgctgtgcatccagtcctttgaccagtgctttcttctcggcatcttcgacgctatactgataaagggtgccatctaccattgtgtacagcatatccgttttcgcatcgtaatatgacatctctccgagttcactttctgcctgtgcatatgatttatttgtggaaataaatactttctcttccactgaattcttctctatatcataataatagacagctactcccacttctccttcgtgctcgccgcggtccatataaccggacaccaggaaggttgtattgcctttggcatctaccttaagaagcttgatcttatgatctgacaccatatttctcacatctgtattttccgcatctgcgaaaccaaataccagtgaaatctcgtctgaatctttgttataattccagagttcatttgcctctacaaatgatacgatcgtgccatctttattcaccttataagacagatttgcaggcgcgatgccgaggatgattcctttctcattcagaaccttctgtgtcgcatcgaagatctgttccattgtccgatcgtaatccagaagataggttttcttggcatctgcaatatatcttacgcggaaaaactctttgaccgcatagcggtctgcctcattctcttctcctttgcagcttacccggtattgcagctgtaccgacatacaggtactgttcagttccttgatgctccagcgttctccctgttctacctgtggtttcagactgccccatgtgacctgttcataattcgaattaatcgtcacgtgctgaagtgtggtgttgtccgcatcatcagtcggttcaagcgctgctccgacgcctgcattttccaccttgccaagtgcattttcatgataatcgctgatgtaattcaggcattctgtaacatgtgcatcttcatcactgacgatacgggtatagaaatataccggatccgcaccatttctgttcaggcggacttccaggatccgctcttcatccagtacttttttcccgctcagatccagggtaaatccttttcccacctttttaatcttcttatgttccagctggcttgtaccgtccatcgtatagactttgtagctggctcccgtgaatttattcccatatgcttctacgtttacatccaggctctggttcgctaccggtgtgatcgtgttgtgcatagaggatatatccatgcgttttgcataacctgtcagtgtattgatcttatattctccataagaaaatgatatctgtggaaatgttgcggctcccatatcggccgtcatattgtcattccccttatttgtcacgtagctgaatataatgacagccacgataaatactgcagtcaggattcctgcattctttaaccttttttttaaagtcaatgtcatttatactccctctttatcctctttctccggatgatctttctctgaatttgcggactccatggcgaacccgtccaacagacgtcccagtgtcggtgatacccggagtgctgcttcacatctcttgatggaagcctctatattattgtcttctttggcatgccgcttctttactgcacgtatcaggatattctttggtgtatgctccatatctataaattccagtatctgcgcttcatacccctcacgctccagatactgtgctcttaagccatctgtgataagtgctgccatacgttctttcagaagcccgtattttaatattggttctaatatctcattttttatctgacggttcagttcatgctggcagcatggtaccgataagatcactttcgcatcccatcccacggcttttgccaacgcataatcggttgcggtatcgcaggcatgcagggttaccaccatatctaccttattgacaccggtataatccgcaatgtcaccctccagaaatctcagcttttcatagccatatttttcacttaattcattacaatgacggatcacatctttcttcagatccagtcctatgattcttatgtcatattctttcaattcatgcagataataatacatggcaaatgtgagataagatttaccacagccaaaatccaggattgtaagttctcttcccttatcaagctccggcaatatatcctcgataaattccaggaaccggttgatctgccggaatttgtcgaatttcgcatgcacgatctttccatcctgtgtcataacaccaagatcctgaagaaatggtaccgggactccctcttccagtacatacttcttcttgcggtcgtggctcatattgatctgcttcttttcgccttttttcatcttgctttttattgttacttttccctttttgcttacaagaattgtataagctgctctttgtgtctccatctgcatctggcgcatattttccatatacttaagaagtatttcacaagcttttttctcctccacattctcgtgaaacgcctgattattccggaatgactcgagctgaaaataaaggacatcttttttcaggatcggtcttactttcactttttgtacactgtctttattcttcgggttactcagcgttgctgatataaattctatatttaaattttcctgtaataatttgcttaattcattcataatattatattctactgttttttagacaggagcgcaagtagcgtaaatggcaattttattaatggttccgtaggatttgcgaaaaagggacaacggtaaatacagtttgagccggaggattttaaaaaatcctccggcccagactatgaaatcgggaattttatcgttactttaaacaaatctccatccagatacaattcaaatgtcccgccctgcatttctgtcagcgactgtgcgatagacagtccaagtccgctgccttccgtacttcttgatacatctccgcgtatgaaacgttccgtcagttcgtcagctgagatatttagcggctgctcggatacattcttaaggctgaaatatgccataccatctttcttttcaagatcagcatagactcttgttccttgcattgcgtattttgccgcattgttgtatatattagacagcactctccacaaccgtcttccgtctgcgcggattacaacctcctcattcggaaggttcatcacttcctccagatcacgcgccttgaatttttcttcaaactctccgctcgtctgctggatcatttctaccagattcagattcatgaactccagtgtgatattgccggagcttacttttgaagcttccaccacatcttccgtcagtgtcttaagccgctgtgatttctgttccagcacttcaatgtagcgttggatcttcggatccttaaggtcctcctgctttaacaattccacataattaatgatagatgtaagcggcgtcttaatatcatgcgatacattcgtgataagatctgtcttcaggcgttcacttttcatgctctttgcgagcgccgcttccagaccttcgccgatggaattcaccttttctgcaatttctttatgctctgccagcaatccatttaccgggatctgataatccacttccccgccggcgatcttctcgatcccggtcttgatctttccggttcctttcgctttctgtaccatccagataaatgctgcaacatctatgatcaacagaatgaccgcccataaccggttgctgatccagatactacttcccgctgatccaaatacgtacgtaagccagtggatcatgaagaagattgcaaatcccataatagatttccacagatgacggatattctggaacatttcttttacgaagatcaaaagccatctgagcacactgttcttccatactgttcccgccttgattcttctcaccagactcaaatatccgaaaagaaacattgcgcaggtatacaatgcctccacacttccaaccactattcccggcagatacgactccacattctccatatagatcgtctctccacttgcattctgccatgtaaatgccccggcctttactcctaccagcgcaaccaccgcccagagtaacagcacacttgcagctgccagttctgtcttaatgtgatcaaatttcataagatacacttcttcgtcttctttaacttttccggctccgattgtaagaaatacaagaatgacaagatatgccgctacagccgccattcccagtattccggccactttggctccggccccgtaccttgtaaagatctcatcctgttcataaaaattatcttttacaggataatccgtatctacaacagaggcatatatataatctgacgcatcgacataaccggccactgtctcctgccacttctgtgccatcgaatcccctttaccggctttttcaatattgctttcataatctgcaagctttggtcttacgattacatattttcctgattttttcatttttttcaggttctctttgtaattgtcaaagttctgatattttttcttattcgtaatgaccgtcttgttgtccagattaacatacagatacgttatgttcgtattgccttcctgatactgattctgagctaccgcataattatcaacgtcagaatagatcgtttcggctgaattatttatcattctgtacgcttcattcagcttgccattccattcttttgaattgttcacaagctgaagtaccgtctctccatttaccgtcttataatccccgacaactctttcaccatcataattccagcaattgatataggcaatctttccatcgatatcctgaagtccccggaatctggattccccactgttgctctcctgatactctccctgctttagttctgtcaaaatatcatccgcagaactgtctccggtaattacaaatgacagctctccgtaatcgatcatctgtttaaaatctttgtaatggaaataatgataagttccgtctgaacgtttacatacgataataccgtcctgtttatctaatttgctcctggccgcatcataatccgtcatcgattccgagattaattttccccaggaatacagatctcccagacggaacgacaggcctgtttcatcttttcctgttatctcaccggtatcttcgtattttgccacatctacgatcttatccggatcatatttgccatctgtatcatataaggtctgataccggatctcatccagtatattataatttgcattcgtcacggaatcggcaaatgcattgctttcttcataactcttcgccgcatccacagtgaacagttcctgtgtcagtatcggataacgtgttacccacagtaaacataatactccgataacggccagtacgtgtgcccccactatcaaaaacaattttgctttgggcattcggtaccatttcttcatatataccccttcctaaagcttttctatcttatatccgacaccccagaccaccttcagataccttggttcctttggattaatctcgatcttctctctgatatgacggatatgtacagctaccgtattatctactccgatagcatcttcattccagatactttcgtatatctggtcaatagaaaatactttcccctgattttttaccagtaacaataaaatgttgtattcgatcggtgtcagtttcaccggctctccgtcaaccgtaatttctttctgatcgtcatcgatcataagtcctcccacggtataaactgcctgattctctttttccactgtacttccaagctgtgtatatctgcgaagctgtgattttacccttgcagtcagttccagtggattaaatggcttggtcatataatcatcggctcctacattcagtccgaggatcttatcggcatcctctgactttgcagacagaataatgatcggcatattctgtttttcccggatttttaacgttgcgcggattccatccaatcttggcatcatcacatcaatgatcagaagatccactttatgcttatccaaaagcttcaatgcttcctcaccgtcgtaagcttttaatactttatatccttcctgcgacaaatagatttctatcgcctctacgatttctttatcatcatcacataccagtatgttgtacataattcatcacctcccttataatatacaagaataccagccaatttttaagtactgtttctgtaatttcttaagatattatgaaattattcctttccgcccactttatcagagatatgcagagtgttaatatttcgtcaaaaaataataaactatatttttcttaagcagattttttatataatagatatggatatctttttaatattttttcatactgcaaacatttcttttttaactgttacattttaaatattaaaaattaacttagaaagaagatgaaagtattatgcatgaaccagaaatagaatatcttatccggtctcttggcattggcgctacttatcggggatatgcatatttaatttatgggacacgcctttgtctgtctgatgaaaattacctccttttcgtcagtaagtatctttatccagacattgcacgtcattataatactaccagctatagcgttgaacggaatatccgcaccgttataaaggtctgttgggagcatggcaataaatccctcctcgaaaagattgctttgcgtccactgcatcttaagccgacatccagtgaattttttgatataataactgctcatttacgaaaaactgccatttctgcctctgatcttgtttctgtttagattctgtttttatatgcttcatttttacttaagattttttcgaattcttttatgcttttaacatattttagacatattttccatttatactaaatgtcagatagttgatgaacaacaactatcacccccctcataaagtaacacaccgaaatcactcttcggtgtacactttactctcattcctttagtaattataacaacaacaaaaaactctccgttccggagagttttttgttgcgcttttttaataaaacagatcacaagccacactgtttacatattcttgttaaaatacaacgacaagcaacatcttaaactgctcttttccgtgcactgcatgcggatgctttgccggcataataattgatttcccttcatgtaactcatatttttcgccattgatcgtaatctcacctactccgtcaagacaggttacaaatgcatccccgcctgattcatgtgtactgatctcttctcctttgtcaaaagagaataatgtaacacttaatgcatcgttctgcgccagtgttttgctgactacctgtccttcctggtaagctacctgatcttttaatactaatacttctgctttactgatatttttgatcatactcatatctattagtcctttcttttatcctatttgttattgtattcctcaataacatttttcccttgtctcttactataatacttttttcgttctaaaatgtggttttaacaacaaatatcacatttttataaaatgaacatactttgtacacattttttgattataatagaaaaagatagttggataacaactatcgcccccctcataaagtaaaggccaccagaaggtcacttctggcggtccattttaccggtaatttctgcggatgcttttatggctccgcttttttttaattgttcataccaggcagtcgtctggtctttatccttattattcatgaataccgtatatttctttgtcttaatctgtatgacttctgattgttccagccacacatacatccggcattttcccgattctgctccgtcaaattttccaagcaactgtttttcatcagccgaaccattggttttactaaaatgttccttcggaagcccattttttaataattttacggattttatatcctctttttctccgtattggtgtaaccggatgtgatcttaaaactgctgccatctgtcggacggttggaagaagttcgccttcttcaaattctccttttccaataccctttacgatctggttgcggagctggaggtaaattggaatttcagatttcatatcttgcatactttggtataaaaaatccgcacagacactgaaaatcttaacatttcctcaatttgtgcggatttttcttccacattttattcatttaacagttttatctgcgatttttttcctcgatccacgccaggatatcctgatacacattctgacggtctacttcattcaatatctcatgacggtcgcccttatacagatggatcgacacatcttttatcccggcatctttatatttctcatagactctgatcacattctttccgaaagcccctaccgggtcatcggatcctgccgtaaagagcaccggaagcgtcttcggaatccgtttcatacttcctttccgtaccagaaccttcataccggcaaacatctgataataggctcccagtgtaaatgtataggaacacagcggatcccgcacatattcatcccttttcttcttgtcggatgtgatccattccttcgatgtctcaccaggttcaaatttcttattgaaacctccaaagctcagattatccacaaatgtacttctgtatttccatcctttgaacgctgcgatgatcctgcagatcatccttcccgcacaaagcgtcagcattccctgatgaccggttcccataatgacaactcccgcaaggccttccgcatacatcgtcagatactgtctcaacaggaatgaccccatactgtgccccagcataaaatacggcacatccggatattttttccgtgtcatctcctgcagctgataaatatctccgatcacatactgattacctttccgttcatcaaaatatcccagatcagcttctgtctgtatggatttcccatgtcccagatgatcatgtccgactacataatatccgtgctccgacataaattcggcaaattcatcataacggtcaatatactccaccattccatgacatatctgtaagacaccttttatatctctatccggaagccattcgatcgcatggatctttgtcacggaatctctggatgtataataaaattcatgcttcatcatctttcatccattctgacatactctttgtattcggccaacggtttgtacgccggacgaatgatcttatctacattcttaagctcttccagacggtgtgcactccatccgacgatacgcgctgccgcaaagatcggtgtataaagtgacggtggaagatccaacatactatatacaagtccgctgtagaaatcgacattcgcatttacacctttgtatatcttacgcttttctgcgatgacctccggtgccatgtgctctaccttttcatacagtgcatattccttctcacagcccttttctcttgcaagctgcttaacgaacttcttaaaaatatcggctctcgggtcagatacagaatagattgcatgccccattccgtagatcagtcctttccggtcaaatgccttcttatccaataaatcggtcagataccggcgtacctcatcatcatcttcccagtcactgactttttccatcatatcgtcaaacatctgggttactttgacatttgctcccccgtgctttggtccttttaaggatgccatagcagccacgatcgtcgaatacgtatccgttccggatgatgttaccacatgcgttgtaaatgtagaattgttaccgccgccgtgatccatatgaaggacaagtgccatatccaggatctttgcctctaatttcgtatatttcttattctcacgcagcatcatcagtatattctctgctgttggtaattccggtgacggtgcatagatgaagagatcttctcccatacggtaattatatgcatgataaccatagaccatcagcatcgggaactgactgatcagattcaggcactgacgcagtacatttggaatcgacgtatcgtctgcatgaggatcatacgtgtacaggcttaagatcgatctcgacaggctgttcatcatgtcacggcttggcgctttcatgatcacatcacggacaaatgtcggcggcaatgtccgtctttccaccagtgtctcatgaaatgtctgcagctgcgtcttatccggaagttcaccgaataacagcagataggcgatttcctcaaatccatagtgcttatctttcagaaacccctgcaccagatctttgatattgtagccgcgatagtaaagatttcctgcacatggcacttcctctccgttcacgatcttcttcgcacatacatcggaaatgttcgtaagtcccgcaaggacaccttttccgttcaggtcacggagtccccgtttgacttcgtacttcgtatacagctctttgtctatcgcattattcttctcgcaaagttctgcaaaatggctgatttccggtgttacctcaaatagtgtctgcccttcttttctgtccatcgtcatcatcctttcttatatggagataataaatcactcaatcttgcgaattcttccagtgtcagtgtctcacctctcacacttgcaccctttccaagtgcatcaatcgctgcttccacttcttcttttgtaaaatctaatgtcgccgcattcttcagaccgttcgccagtgtcttccttctctggttgaaagatgcacggatgatgttgaacatcagcttctcatcctgcacctgtaccggtttctcctgatgacaggtcaagcgtataaccgctgatcctaccttcggtctcggcatgaaacaattcggcggaacatttgccacaatatacgggtcggcataatactgtactgctaatgacagtgcgccatagtccttattacccggtccggtctgcatacggtccgcaacttctttctgcaccatgacagtgatactctctaccggaacctcattttcaaaaagtcccatgatgatcggcgtcgtaatataatatggcaggttcgccaccactttgaccggctttccgttgttctcttcgtctgcaagcttcttaagatccagcttcaatacatcttcattgatgacacgtactttgtcatatccgcttaatgtatcctccaggatcgggatcaggttcttatcgatctccactgcaatcactttacccgccgcctgcgccagatactgcgtcatcgtaccgattcccggtccgatctccagtaccatatcatccttcgtgatatttgccgactgtatgatcttatctaatacatgcgtatcgatcaggaaattctgaccgaactttttctgaaatgaaaaattatatttctgcagaacttctatcgtgttctgcggattacctaacgttggttctttcatgattcctcccacgtatgaacttatttcctaactttccactacaattcaggtcttttcagacatactctggtgtgtaaactgtagcgattattcctcattatacaataattttacggggattaatagcaataaaaaatgaaatatgtataaatatataaatggaaacacacacaattttagtttccataccaaaggaactcatatccacttaatcttatatctttcaattctgtcttttcacccgtcaacagattacggtacatccctttttcctgcatccatgctgtcttctcctgattgctgaagttgaatattccaaagaatcttctccctttatattcccgcaatacacacaggatactgtcgtcatgtacatcatatgtatacacatctgcatctttatcaaatgttatctcctgtctgcgaatcttttccaaccggtcaagtgtctgaaatatgtttccctgaaccgttgtgacatcttccttatcctcagcgagttcccacggtaactttccccggtggatatatcttgaatcagcacatttttccggatcgttcttataactataatcgttcacctgtcccagttcgtcaccactatataacattgggatccctgactgggtcaacatatatgcatgcagcatgatatcttctctaactgctgcgttcattgcttcttcatcgtgttcaaatccggctttttcccgtgaaataatcattcagataacgtttatgcggaatttcttttattccccatggcctcatcgtctcataatccagtccccatccgatatcgtcatggcagcgcagataatttaagaatacatattgctttggcagctggttcacaatatccatctgttttttcagcagccggatatcacctgttgctatactgttccaggtcgttgccatagtcgtcacattataaaacatatgacattccggcttttcaaccgttccaaaatacggcacaactttttcgggttccattacaacctctcccagaagcaaaacacccgggcatacaatttctgctatcatgcgcatcatacggacaattgtatacacctgtttcagatttctacatgtagttccaagttctttccagatatacggcaccgcatcgattcgtacaatatctatcccctgatttgtcagatacagaaagttatatatcatctcattaaatactctcggattacgataattcagatcccactgatacggataaaatgttgtcatcacctaatgaccggtttccggaagatactgtcatttttcttttctcttttttccattttcttttgttccttcctctaaagaatcttcctatgtactattttcctgtaaaaaatgcagaagaaactgcttgtcagcagcttctcctgcatttacaggttcttgtattctattcttctcccaccagatgcatctggtacgccttgaattctcccatctctacaggcatcgggattcctgcttccataagtgctgcgccattataagtctttcctgtttccgtatcacgataaaccgcactgcatttcaatccctgaaggtttacataattcacagtcatatttccatgaatctcctgcatcactacattcagcagtacttctttctgatcttctgatacgaatgcccatgctgcatattcttccttcgacggatcagacaaacggtaataaagtcccgtctggatcagcggtgcgaacttccgatattcttctacctgtgaccggatctcttctttttcttcttcagaaagttttccgagattcagttcatatccaaatgttccagccattgccactactcctctggtatgcagagatgtaattcttcctgtctgatgattcggtactgccgatacatgtgaacctacagcggatatcggatagccaaacgatgtaccatactggatctgtaatctgtccaatgcatctgtattatcactgcaccagatctgtgacgtataatgcatcattccggcgtcaaatcttccgccgccgccactgcatccttcgatcagcagatctggatatctggttacgattctttccagaaagtcatacagaccaataacataatcatacataaccctgccctgatctttcgttcccctcgaaaatacatccatcaaactacggttcatatcccatttcacatactcaatatttccctggtccaatactttgcagatctgatcaaatatatggtctacaacttcctttctggagaaatccaacaccagttggtttcttgcatgaaccggatttcttcctgggattgtaagtgcccaatccggatgttctctgtacagatcactgtcttctgagatcatctccggctctatccagattccgaattttaccccaagatcattgatcttctgtatcagacttcccagtgttccgccaagcttcttctcattaacaaaccagtcaccaagaccgctgttatcatcatcacgttttccaaaccatccgtcatccagcaccagcatatcaatgcctacattctttgcttcttttgccagttcatataaggtatcgccgtcaaaatcaaagtacgctgcttcccagctgttcaccaggatcggacggatactttctttatactttcctctgcagatatgctgtctgatacagcggtgcagattctgcgaaagctggttcattccacttcccgagaatgacaggagcacttccggtgtataaaacaccgatcctgtttcaagcggataagaaaacatctcatcctgcaggccaagaagtgcacgtgtctgaccgaactggtctttcaatgcctctcccttaaaattcccactatacacaaatgacattgcatagcagtttccgcagctgtctgttgtatgttcatctgcaaggatcatcatcggattatactgatggcttgaagttcctcttacacttccgatcacatggcttccatgcgtaactggttctctctgcatccttctttccatcgcatgtcttccgtaaaatgtcagaagatcatatttgccataaaggaaatcaagacacgcagactgtgctttctggataaaaatctttccatctccatgataagcaatctttgcacttctggtaatcacatcatagtccggaagtacaccatacagaagtgttacttctactcctgtaaccacatcttccattgtaatctcaagtgtctgactttctgtctcttccgcatagactgccggaagtcccggaatcttatatttcccattagaaatctgatgtgaacggtatcgaagatcacacgctgtacttccgtctgcattttcaattatcagagccacacttctgtaatccccgattccgtaacacggatactcctgaggaagtgcatccatcgaataggttctgtcacttccggcatcatacggattgcctgaaaatcctctgtcataatatgtcagaagataatccatacagcttccatctgtcttctttccataatacagatgaagaaggaatccaaaacggtctacctgcatctgatatgttgtattttttgtctgtattgtaaatgtcctgtctgcttcacagtaaacaattcccatttctttgtctcctttttatgtctcaagttctatttgcattccgattattttacggctccattcaccacgccattcagaatatgtttctgacagatcagataaaagatcaggattggcagaagtgccagcaggtacgaagcaaatgccagattgtagttcgttccaaactgtgtctggaaattaagctgtgcaagcggcaatgtattctttccggttcctgacatgataaccaacggtgtcattacatcattccatgttccgagtgctgtcagaaccgctactgtcgcatgcattggtttcataattggaaagataattttccaataagttgtccatgtacttgctccgtccacacatgctgcttcttccagtgccatcggaatattcgtcagatatccggaatacaaaagcacattcatcggcatataaaagaccagatataagataataactccggctctgttcgcaagtcccatctgcgccgtctgttttaccaccggcatcatcaggattgcaaatggtacgaacataccgctgacaacgtaaaaataaatgaatttataaaatttgctatgtgccttatttcgtgcaattgcatatccaagcagtgagtggatcagaatggcaaacactaccgtcacgatcgtgatcagcaggctgtttcccagtgaattccagaaatccgttactttcattgcctctgcaaaattactcaggctgaaatgctttggaagcgataatattcccgcaatatcatttgtcatctccgaaggcttcttcagtgcaatgacaacggtcatatataacggaaatatgacagtgatcaaccctgcaatcaaaagaatcgttacaggccagtttattctttctttcccaacttttttcattacaactgttcctccttcttaccggtgatagtcaactgcattaccgaaatcactacaatcacaataaagaaaataactgcatttgcgctttggaatccaaactgtccgccactcattccgttattatagatcagatatgagatggattctgtactctgggcaggacctccttttgtcaatgccatgatctgatcaaataccatcaggaagtttttcacactcagaaccatattgatagagaaaaatggaatgatcagtggaaatgtcaggttcctgaacttcttccatcctgtagcaccatcaatggcacctgcttcatatacatcctccggaaccgtctgaagtcctgaaatataaatgattgtgttcattgctatcgactgccatgcacacacaatcacaatcgcgatccacgcaagatttgtattagaaagcatactggaactaaatgtcttacttccgatcatttttccaaatacagggaggatatacgtaaagaaatagttgaaaatgtatcctaccaccagtgctcccagtacattcgggataaaatatgcacccctgagtccgcttttgaacttgatcttactatttagtccgagtgccatcagaagactcaatacatttgtcaaaattgtcgccgcaattgccaacttaaatgtaaagatatatgagcctccgactctggaatcggtaaacaggtctatataattgcgaagccctacccagtcgtaacttccgtatcctttaaaattggtaaaactgtagatgacacctttgatcagcggcagcgtattgaagcagaaaaataatgcaacaatcggaatcgtgatcagaagaaatgtccgctttctatcatttaatttattctttttcatcgtactaactccttgaacttccgtattatcagtaacttatctgtcttagtcattatgcgatttctcgtaatcttccactttacggataatatcacgattatatcttacccagtctgtatcaaatttcttaagaaatgccttgctgtcttttttcatcaggaatgtctggatctgtgcgtctaccgccatttccgatggataataatgatcctggtagtcagacatttttccttcttttatatattctttcattccttcaagggttgatggcagttcaaaatctccttctttacaaggaaccgccttctgcgcatccagatatgcctgtacattctcatcttccaggagaaaatctaacacttcatatgctgcctctttatttttgcagtcttgcattacgcagaactgaagatctattcctgaattcaacgtattttcttccttgttattacttgccggcattacaaatgaatcgatctccatatccggattcaccgtctggatctgtggaattgcataacttccgatcgtatacattgcggattcaccttttgcaaatgccgtacacgccccgttgtaatcatatgcaaacgggtcatccggtccatatggaagcagctccagcatacgttctgccacttctttatattccttcgaaaatgttgtctttccgcggttcacctgtgcacacacatctgcaggagcgagatctaccgcaaccgcattccacggtgcaagacaagtccatgtatctttaaatccaaaataaaatggctggattcctgcattctgtatctcctgacacaggctcatgagttcatcccatgtagttggtattttccatccatgttcttcgaacatttccttgttgtaaagaattcctgctgcatttgcaacgtatggtaccgcataagttcctttttccggaacaaattccagatttttatcaatttctttatatgcctctttaatatcttccagacctttatagtcggaaatatccatcaacatgtcagaatcgataaagtttgaatagttcacgtctcctccgattccaataatatccggattatcttcccggataaatctcgtcttcaaaacagtcattgcatcattcggagattcaattgtaagatgaatatcatcatgtgtacggttgaattcttcttctattttctcaaaagtttttactgcttccggcttatactgcacaagttctatttctgtctttcctgtctcttttttctgtccgcatccctgcagcatcatagccccagccatcgtaagaaccagtccggcacttaccagtttcctgtacttcctatgcatgttccaaaactcctttttactccgttccttcctgattttgaacctttcccgggatatttatctgttttcatcgtcaggtttttgcttttcatctattacaaatgaattgtaacatatcataatgcgtctataaatatcttgattttatatgttttatagtaaaatgcaacttttcccgttatatattgaagtcatctagcattttggtatatactgatgaaaaaggaggtgtcgtatgagtgacattttattttctgtttttccaaatgagaattttgtagatatcggtttgtatcagtacggctgggaacagtgtgaaccttcacattctttcggacctgctgccagaaatcattatgtctttcattatgtaatatccggcaccggtaccttaatggccaatgattcttctggtaacacgataaaatatcaagtaaaaagcggacagggttttatgttatttcctaatcagatcaatacttatattgcagatcaggatctgccatgggaatatacctgggttgaatttgacggactccgcgctaaagagattgtttctaccgccggactcagtcccgatcatccggtctatcacgccggttcaaaagaccttcgcaatgaaatgatgaacgaaatgctatatattgcccggcatccgggttcttcttccgagtcgccatttcatatgatcggccatttatatctgtttttagattatttcatgcgttccgctgctaccgtgcgcatgaatcagagtggaaagatcagggatttttacataaaagaagctttatcttatattgaacagaatttccagaacaatattacgattgaagatattgcagccttttgcggtctgaaccggagttattttgggaaaatatttcacgataccatcggaaaatcgccacaggaatttctgatcagttaccgtatgacaaaagctgccgaacttttgaagttaacatctctgtctgttgctgatatcgggaatgctgtaggatatccaaatcagttacatttttccagagcatttaagaatgtctatgggacttctccaagaagctggcggaatactaataagttggaacctgattaatctcttgcatactacggtatgacaaaaggacgtatgaaaaaactttcgttttttcatacgtccttcctgttttcatattcacactatccacaaatcttatcgatccatgcgaataactcttccaagtcgtagtctccggcatgcggcatctctatctcctgatgccagtgttccagaacgtctttgatatcgccccggtcgtcctgtgtggtccggcctgtgaagctctgtatctgcaacgggagactgtgtatgtattctacaatttcgtaattattaaacatattactccttttgaggacattacttgtccacgatttcccctgcaattattcgcatggcttccacaatttccgcaatctgttctttcgtgatcccgtccatgtgaatacctccggtgcacaccacggtcgttttctttcctgccgatactttctcagcaagataacggcatacttcctcgtccttatgccccgtcacgttcagtaccgatgccgtgctgctcatcttgccgctaccgtcaagagacggtcttggaatcgcaaggacggtacagcctatatgtgggcattccccaccgcttactaatatgtggtaatcatcgccgagtctgcgaacttccacacagatctcagtaaatgtcagctttttctttatttcccagaagttatcggtctccatactgtgacactcccttctctacacaagtccggtccatcgacggtattctctcgcctctatcccgaacggttccaccagctttgccgcaatatgatatgtcatctcttcgatattctccggctgatggtaaaatgtcatcatcggcggaatgatccggacccccggaatcgtcgcaagttcggaaaggttacggagatgtatcgcactaagcggagtctctcttgctgcaaggaccagtgtccgctgttccttgatcgtcacatctgccgctcgcaagatcagattgtctgcatagccgctgtggatacctgccacagtcttcatactgcatggaacgatcagcattccttccgtgcggaaggatccgcttgccggtccggctccgatatcttttgtatcacatacctgatctgcaagtgcttcgatttcttctactgtgtcttttgtttcctgctgtaatgtgattttcgcactgtcacttaaaatcagaatggattcatagtctgaatccccccggatgatctgcagacacattttcaggattggaagaccgctcgcgccggttgccgccacaactatgcgttttctatcctttttgtcttttctgcttttcgtcagaagacattccttatcttctctactctccctgcacatcttatttcacccaatgctccggatctacatccatgaactgtgcacgcttgaatctgtctttctgatcatacggaacagtacagtcgaagattgtcttgcatgcgattccgtgatcgcggatactgccggagcagctcggatcattggacggatccagcggatggcatctgactcccggaattgtaataatatctgcatctccctggaatcttgtattcatcgcccacagtacatcgttcatatcaaagcagtctacatcttcatcaaccaggaatacatgtttcagctcactgaatgcagagaatgccagaagtgctgcctgtctctgtcttccttcatcactggccgtaagcttcttaaactgcagaacggccatatattttccgccgcccggtgaagcgcaatatacgttctgaagtcttccaggcattgccttttccaccattccgtaaatgcttgcttccgtcgggattccggccatagatacatgttcctcactcggtccgatgcaagtctgcatgatcgggttctttctgtgtgttacagctgttactttgatcatccagcactggtcacttgccggtcctgtatatccagggaattccggcatagcatatcctgtatggctgttctgatcttcctgtactcttacattcggaacaacttccccttcgatcacatactccgcattggcgatcgcacgttcatttaccgtcaggcatttgcaaagtctgaccggttcacccctgatggcacctgcaactgcaagttcatcgtatcccatcggtgttgtcggcggctcaaagcaagagccgatctcaattgcaggatctactccgatactgatcgagatcgacagacgctgtccaagctcttctgctctttctgccattgctccgatgtggcgtgcacccggtgtaaagaagatcgataattcatctttcccctggatgcagagtctgtggatcgtcacatcacttactccggtatccggatgcgatgcgtagcacattccaagcgtaatgtacggacccgcatctaccggcgtattcgtcggtgccggtactaatttgtataagtcaaaatccggatctgtcgctttgtgtacaacttcctgacaaggtgctgcttcttctgtcagcaccggcgggatcgggttatccacgctgtgatataatttctttccgagatctttcggatcacattccagcaatgcaccgactcttgttctgctcgcaagcacgccgatcgcaactcttgctcccggatgtccttttacattgttaaatatcattgccggtccttctttggtcggacgcataacggttccgcccgccccgacatgacggtatacaccggaaagctctgccatcggctcgacttccacatctgtttcaatcagctgtcccggcatatcttctaacatttttaatgcacttctgagatctgtgacttttgctgccataaaataatcctcctgttttttcattctttattgaaatcattactcatactctttattccaattttaaggattttcagatgcaaaatcaattctacttatgctataattgattccaaaatggaatgaattgcaagaaattttcgcacaatataaggagacctcagatatgacatttgatcaaattcagtattttattgccatcgctgaatgcaatacctattttgacgccgcagaagaactaaatatctcgcagtctgcactttcaaaacagatcataaaactagagaaagaacttggcgtcgccctgctcgaccgttcccgccgcaaggcctcccttacccccgccggagagaccttttaccaggacgccctggcccttcgccggcagtatgagatcatgaacagacacatgaagaagtatcagattttcacgggaaataaaaatgaactccgtgtcggaacactgccgatcctgacacagtacggactgaccgcacatttccgtcagttcaccgaatcccatccggacattcatctcattctcgatgaagtcgaagaaaatgacttaaaaaaaggactgctatccagtcagtatgaccttattatctgccgggaacagatgatagccgatcagagcgacatttcttccgtctatcttgcggacgatgaactggtcaccgtccttcccgttggacatccgcttgacggacccgtatcactttccgctcttgcagacgagtcattcatcctgatgaaccgctacacctccgtctatcagatctgtcaggcactgtttgcaaatgtgccggtccacccacagattctaagaaccggacgtgtcgaatcgatcatcagcgccgttgccatcggggagggcgtaagcctccttccatacagtaacttcaagctctttcatcatgagcatgtaaagacactaccgcttacgcctccggtaaagcttcctgtcgtaattgccggcacgaaaaaacggataaattcctctatctgtcaggaattcatccgttgtatgacggaacattaagttttgtaaccagattgcccagatcattaatttgttgatttcacatttcatagcacgctatgataattttgtatgtttttatcgtatttcgtcagctacaaacggtacatatctctggcatttttctccgtctgttcgactacttcttcatacgtaatgccctttaattccgcaatcttctctgccacataacggatataagcagaattattgcgctttccacggtttggttccggcgccatgtacgggcagtccgtttcaagtacgattgatgtcagcggaatattttccactacttccttcaacttcttcgcattcttgaacgttaccactccgccaacgccgatgtaaaatcccatcttgatatattcttgtgccatttcttttgaataagaataacaatggatcacgccgcttagtcctttcgcatgctccttcataatctccatggtatctgccgctgcctcccggctgtggatcagaaccggaagatccaactctcttgccagttccagctgccgtatgaaccattttttctgcacttctctcggctcattgtcccagtaataatccagaccgatctcgcctaccgcaaccactttctcctctttaaacagctctttcatctgtgcaaaggtctcttcattcaggcttccgacctcatccggatgaatcccgactgccgcatatacaaatggatactcctttgcaagtgcgataacctttctgcatgaattgtatgttgcactgacatttataattgtgccaacgccctgctcttccatagaattcagcaattctactctgtcctcattaaactgctcatcgtcataatgtgcatgtgtatcaaatatcatatatccctccggggacggaggattttcaaaaataatgtcttaaatcctccgtcccaactcaaaaatgtcctgtccccagtatcctaatatttatcccatcttttccacacgttatcccaaggaatttcatggttatcccacccttatcccaaggttttccacatacttatccacatcatgtggataacttgtgtgacagatactgtatatagatgtcggatattggagatatatatcaaacaaggacggtgattcccaaaatcctccgtcctcattttcattctttcatatacaaagccaactattatcaaccagtttctttgtatctttctatacttacattagcagatctctgcaccggccggcatatttttctccggtgtcataagtgccaggttgccttctgcgtcttccgcacacagtaacataccttcagataatactccggcgagttttgcaggttttaagttcacaagaaccataaccttcttaccaaccatctcttctgctgagtaatgtttcttaattccggatacgatctgttttacttcgcttccgatcttaacctgtgagcagagaagtttcttagattttttcacttcttcgcaggcaatgatctcaccaacctggaactgcatctttccgaagtcatcgaatgtgatctctggttttgcttcgatgtcgatcacttcttcgtcagcttcttcttttgcctcttccttctcttctacatgtggatgaagttcttctactttcttcattacttcattgacgtccagtcttgcgaaaaggatttctggtttctctgttacttttccatcaccaagctgagcaagaatcttctcagatgtttctggcatgaaggattccagaagttttgctcctgctttgatgctctcgatcaggttgtagagaactgtctccagacgatctttcttagcctcgtcttttgcaagtgcccatggcattgtctcatcgatgtatttgttgcagcgtttgaacagtacgaagatctctgtgattgcatctgcgacacgcagttcatccatcttcgcatcgactctcttcggagtatcttctgtgacagccttaagatctgcatcgacagccttttcttcttctgtctcggcaacccccttatctgttacaacaccgccgaagtatttatttgtcatggaaatagttctgtttaccaggtttccaagtgtatttgcaaggtcagagttcatacgctctaccatcagctcccatgagattacaccatcattttcaaatggcatctcgtgaagtacgaagtaacgtactgcatctactccaaagaaatctaccagttcatctgcgtaaagtacatttcctttggacttactcatcttaccgtcgccctgcagaagccatggatgtccgaatacctgttttggaagtggaagatccagtgccatcaggaagattggccagtaaatcgtgtggaaacgaatgatatcttttccgatcagatgaaggtctgcaggccagttcttgttgaacagctctgtgctgttgccgtcacagtcatatccgattcctgtgatatagttggtcagcgcatcaagccatacgtatacgatgtgttttggatcgaagtctaccgggattccccacttgaaggatgttctggatacacacagatcctgaagtcccggaagcaggaagttgttcatcatctcatttttacgggatacaggctgaatgaactctggatgctcattgatgtagttgatcagtctgtctgcgtatttgctcatcttgaagaaatatgcttcttcttttgcaggcttacactcacgtccgcagtccgggcatttgccgcctactaactgagactctgtccagaaagactcacacggagtacagtacattccttcgtaagctcctttgtaaatatctccctgatcgtacaattttttgaaaatctttttaacctgtgcttcatgatcttcgtctgttgtacggatgaatttgtcataagaagtgttcatcagatcccagatcttcttgatctcgcatgatgcattgtcaacgaattcctttggtgtaacacctgcttcgtctgctttcagctcaatcttctgtccatgttcgtctgttcctgtctggaagaatacatcgtatccctgacttcttttatatcttgcgatggcatctgccagcacgatctcgtatgtgttaccgatgtgcggtttgcctgatgcataagcgattgctgttgtaatataatattttcctttattacatttttcacacatgtctttttctctccttttatgtttaccggatatattttcttcgcagaatctgaatatctacataacctgctgcctgcaggctttggctgccaacagatttcttttctatataaacataaacaaaaaatcttccctgaattcactcctcataacttctgttacaattcataaatctcagggaagacgaaaatccgtgttaccacttccattcactgccagtctcgcaactgatagtctctgcgggtgaagctgttcactccacctcaccgctgtaaagggcggagcccttcgtgaacttacatctttatctatctttatcaatgctcatccacaccgctcagtaagccatcttctgtaacgtttcacctatccctctcagcagcacactgcggcatcctcaccggcagttcacgggattctctgtaagatttcctgttacatactctcttcatcactgcgtttgtcatatatccactcgtaatttaaatcgtagcatataagcgggcgggatgtcaaggactacagactgtactcatcaatcttctgcaattcttcctctgtaaatggcgcactgtgtattgcttttatattatccagaatctgctgcgtttttgatgcaccgatcaggacactggtaacttcttttttctgaagaagccaggcaagtgccatatccgcaagcttctcaccacgctgagccgccagttcatttaacttacgaatctgttccatacgctctgcggtaagaatactttctttcaaaaatcttccgtcctttcgaatacggctgtcttccgggatcccattgagataacggtccgtcaactgtccctgtgccagaggactgaatgtaatgagtccttttttcagattgccggtcatatcctttaatccattcttttctactgttctgtcaaatatagaataacagttctgattgatcacaaacgggcatttcagatctttcaggatcgctgctgcctgttccaaagtctctccatcataatttgaaagtcctacatagagtgcctttccctgacaaacagctgttgccagagctcccattgtctcctcaagcggtgtctccggatccattctgtggtgatagaaaatatccacataatccagtcccatacgtttcaggctctgatccaggctcgccagcagatatttgcggctgccccagttgccgtaagggccttcccacatatcaaatccggcctttgtcgtaatgatcagttcatcacgatatggcatcagatcttcttttaatattctgccgaaatttttctccgcacttccgtaagccggcccgtaattattggcaagatcaaactgcgtgatgccattgtcaaatgctgtgaagcaaagctgtctcatattttcataatcggaagcatctccgaaattatgccataagccaagcgaaatcttgggaagcagtaatccgcttcttccacagcggttatattccatgatgttgtatcgttcttttgcaggtgtatacatatattgccctccttgcaccgtagatgattccccggtgtactatgaatgaatttaaaattttcatatttagtatacttctctgtttttcgtcctgcaagtcagactgatcacattattttatattttttaacggcacctatatttcgtgttcttcacaattacagatctgaagtaccgctccattttccaccaaatatagccaggccatattcgagcggacaccggatatcatcttctaattttttcttatattttcccatcattcatatatgcttccacttttcacatcattgacgcttcttcccagaaagcttataatattctcggtatttacagaaactatacataagattggggaatttattatgaccagaagacaatatttcaccgccggtttcaaggacggaataccgatctgtcttggatacatagcggtttcatttacatttgggatcatggcaaaaaaagtcggaatttcgatctttgatgcggttctgatctctcttaccaatgtgaccagtgccgggcagtttgcagggctgtcactgatcgcatcgaccgcttcttatatagagatggccatcacacagcttatcatcaacttaagatactgtctgatgtcctgtgcgctttcgcagaagattgatccggaagcgccgctgttccaccgttttctcattgcttacggtgtgaccgatgagatcttcggcgtcacagtttgcaagggtggaaaactgagtccgttttattcttacggggttatatttatctctgtattcggatgggtattcggtacatttcttggaatcctgtccggtaatatattaccggctcgtgttgtcagtgcattaagtgtcgcactttatggtatgtttctggcgatcatcattccgccggcccgtaacaaccgtgtactcgcaggtgttgttgtcatttccatggcagccagctttttatttgacaaaacacccgggcttaggaatatttcatccggattccgtattatcatcattactctgatcattgcaggaattgcggcttatttcttcccggtgaaagaggacgagtacgatgaactggaagaagctggcgaattgagtgacagtacaaaggaggcacaccatgaatcataatatttacatttacatatttgtgatggcggcagttacttacctgatccgtatgcttccgctgacgctgatccgcaaagagattaaaagcacgtatatcaaatcatttttatactatgtcccttatgtgacgcttgctgctatgacattcccggcaatcctcagtgccactgcgaatatctggtctgcacttgccggatttatcatcgccgtatttctggcctaccgtggcaagagcctgctgaaggtatccttgttcgcatgtctcggcgtctttattgttgagctgattaccggattataagtcatataagttaccggaagtttatgatattagcttccggttataaacaatgaatacatatttgcgggaaatccccatataaatgatacaaatgatttatatggggatttttatgcaaaaatttctcgaaaaatttaaacggaagccattactctttttgcttccgtctgcatccgtacttctactcctttttcttctgttctttcattctcaacaggatgcggatcaggcattttcgaaatatacttctgaacttttccgacaggaaatcagtggaaatacaattactctccactacaccttaaaaaatcccgaaaaatatggcatagaaaatgcgcccatttcttatggacaatgtaccaccgatcccgaactggtccggtctagtgtcgatgcggaacggaccagacttcgctcctataacagaacatctctttccaaagacaaccgtcttacttatgatgtgctgaatgactatctgaattctgcctatgatctgtccccttatacactctacgacgaaccacttgcacctctcacaggaactcagtcacagcttccggtcatcttatcagaataccgtttttatgagatctccgatattgaaaactatctgcagcttcttactaaaacaccggaatacttccgatctatcctgaattttgaacacacaaaatccgaatccggcctttttatggcatcctatactgccgactccatcatcaaagaatgccgggatttcgttcatttaaaagagagtaattatctctattcttcttttgtagaacggctggatgaacttgcttccacaaaaaacagcggcctcaccgaaaaacaacgaaaagcctatacccggcagaacagcgcctacataaaaaaatatattttcccgtcttatgaacagcttatctccggcctgtccgagcttcgcaattccggtaagaataataacggactatgctatcttccaaatggccggacttactacgaatatctggtaagaagtgagactggttcctcacgcagtattgcagaactgcaaaaccttacgaatgcacagattctttcggatcttacagttatgcagcgagtgctgacagaagactcctcctctggctcatcttccgtaacctccgacattttcagctcacaaggtactctactctccgaatctgatcctgaaaagattttatccacattatcaaacaagattacaaaagattttccaccatatccacagattcatacacagatcaaatacgtccagaaatccatggaagactacttaagcccggctttctacatgattccggccatcgacaacacttctgaaaatgtaatctacatcaacaacgggcacctcaccgacaacctctctctcttcaccaccctcgcccacgaaggctaccccggacatttatatcagaatgtctattatgcaagccttcatcccaatccaatccgctgtgtactgaactatggcggctacaccgagggctgggccacttacagcgagatgatgagctactacttttccacactgacgaaagagcaggctacattatttcaacgcaactcatctgtcattctgggactatatgcacttgccgatatgggaatccattacgatggctggaagcttgccgatgcggcggcttttttccacacttatggaataacggatgatgcgaccattgaggatatctatgatctgatcattgccgatccggctaattacttaaaatactatattggatatctggaatttctggaacttaagaaagatgctgtggataagtgggaagataactttacgcagatgcagtttcataaggcggttctggatgttgggccggcatcgtttgatgtgattcgagcgtatttattttaaaaatgggacgggggatttttaaaaatcccccgtcccattttattaattcgtattactagccgcaatcttcaccttactccaaagattactgatctctttcttcgtctcctcattatactcaaagacttcatcattcttattatctgttcttggtatatatgcatcaattccttcgaactctccgcccttgccatacagatctttcataaccttcttattcgccgatgtataacctacataacttgaattgtcataagctccgtcataatcacttgcataattgataaatgcatgtgcaagttccggattcttcgcattcttcggaatgaccatggcgtcggaccactggttggttccgccttccggtaggtagtatcccatgttttcattctcattgatcacatatgtcgcatctccggaatagatcagaccaagtgccttccttccctgtgccatgttatcaatgatctcatcggtaacgatctccggcttcattgtctgtacacattgaaccagccagttatacgcttcctggatctggctttcgtcagacgtattcatcgaatatcccaatgccttcaatgccatcataaaggaatctctctctgagtcatacaggtagatgtcccctttatatttctgatccaggaaaatgttatagccttctttttccaggtctttgatgtcgacttttgtcttatcgtacacgattccgactgttccccaaaaatacggaacagaatattcattctccggatcatacggaagtcctttgaccgcatcatataatttatccatacagttcagtttcgacttatccaatttctgtaaatatccttcggaaatgagtctctggatcatataatcacttggtacaagaatgtcgtaagcttctccatttgcgaccttaatatacatctgttcattcgaatcaaaattttcaagaagtaccgttgcccctgtctctttctggaaatcctggataatatgttcacctacatactcgccccagttgtagatacgaagcgtctgcccctcgaatggcaatggctctttcttgttattatatgtcacaactccggctacgatcgccagtacacacgcaaccgcaactgccggtaacagtacatttcgtctgccgatgctgtttctcttcgcacgttttgcaaaaagtgccggtgcagcattgatgatcacaagtacgatcgtgatgatcacaaccaccagtgtcgagattgcattgatactcgggttgacacgtttactcattgtatacaccatgatacttaagttcttcacaccacgtccggttacaaagtaagagatgatgaaatcatccaccgacatggtaaatgcgatcagcgccccggctacgattcccggcgtgatctgcggcacgacaacttttgtcagtgcctgccacggtgttgcacctaagtccatcgccgcatctgcgaggttcggatcaagtgacttgatcttcggcattaccgataacataacatacggtatacagaatgcaatatgtgccagaagcatggtaacgtatcctttttccacatggaatgtgatgaataataacatgaatccgatcgcagttacgatctccgggttcatgatcggcaggttattcgcctgctccatcaggtcacgtatcagtttcttcgacttgctgactccgatcgctgcaattgttcccgctactgttgagataaatgtcgcaagcagcgcgatactgaatgtcgtcgacagtgcatccatcatatctgccgattccagcatatgcttataccagcgcagtgaaaatccggtaaagcttgtaagtgattttccatcgttaaatgagaatataatcatgtacaggatcggaaggtagaagaatacaaccgacagtatcataaggatcttcccaattggacgttttcccttattcataacgattataccccctttccgccctggttacgaatctcgatcttacggacaaccatcataagtgccatcataatgaccgccatgatcatggaaatggcacttccgaagttccactcgccgaccgtaatgaactggttctcgatcatatttccgataaggaaatactgaccaccgccgagcagcttcggtatgaagaaggaactgactgccggaaggaataccagcgtaatcccgttgatgattcccggcacggaaagcggcagtgtcacacgcttaaatgtctgcgccgggcttgccccaaggtctgcactcgcttccagcaaggaattgtccatcttactaagtgacgtctggatctgcaggatcatgaatggcagaaagttatataccattcccaaaagcactgccccttctgtataaagaagtgatccctttccaagtcccaccatatgcaggattctctggatcagaccgccgtcgcttaagagtccgatccatgcatacgttcttaccagcatgttgatccacatcgggatcgtgatcacaaggatcagcgcattctgcttcttctgctcactgcgcgcaatataatatgcaatcggatagcccagcaacagacagatcaccgttgtcttcaccgcaattacaatggaacgccagaggatcaataagaaatccgggtcggtaaaaaatttggcataatgttccagtgtaaatgtgaacgataaaatgctgtttccctgatctgtcacggaataaagtgcgatcaggaccatcgggaatactaacatcaatattgcccacacgatatacggaaatgctaactgtgaaaatttcttcatcttagaataccaccttcggcataacgtggatatcttccgggaagaatgtcaggccgacctcctgtccttcctccgaataatccgttgtatggatcttgaactcacgtcccgtagtggaaaatgtaatctcatacacgccttctgttacttcttccggatcaaaatcatagtctacactgatgtccacactctggtcttcatccgtcagcttccatccctgtgcatttgcccaggtcttaagatctgtatccagtgcctgagattctgtgatctcgtctaccgtcttgaagaagttgaacgccataacaccttcatttgccttctcattcttaacgaacggctggttgactacgaaaatggttctctcgatgctggttccgtttgaagtgctgaatgtaaccggatactgtccttcttttgcttccagttcatattcaatatttgcaatggaaatgtactcatccgtctctgtctcccatgcctgtgcattcgacagtgcgacgatttccttatcatccagattctctacatcttctacgtctacatagaagttgttggcactgatcttctcgcttccgtcttcactggttacgtcatgattgcggatgacgcgcatgttgaccgtaacgctcgttcccggaacggtctccaccatgatctcatagtgcacacccttgaacaggacacttaagacttctcccgtcatctttccgtcttttacatccacgatatcaatatcctccggacggatcacgacatccaccggctcattctccttgaatccatgatccacgcagtcgaatgtaatatcatcaaaacgaaccttataatcctcaatcatccttccggaaatgatgttgctctctccgataaagtttgctacgaaacggttcgtcggctcattgtagatctcctgtggggttccgatctgaaggatctcacctttctgcataacgacgatcttatccgacatcgtaagtgcttcttcctgatcatgcgttacgaagataaatgtaataccgacctcctgctggatacgcttcagctcatactgcatttccttacgaagctttaaatccagcgccgccagcggctcatccagaagcagtaccttcggctcattgaccagcgctctcgcgattgctacacgctgctgctggccgccggaaagcagtgtcgtattcttatcctcatagccttccagaccgatcagtttcagcatcttcattactttctggtcgatgatatctttactcattttcttaagctttaatccaaatgcgatattttcatatacgctcagatgcgggaataatgcatatttctggaatacggtattcagctctcgttcatacggcggcttgtcggtgatatcttcattatcaaagatcacctttccttcgtccgcatccaggaaccctccaaggattcggagcagtgtagtcttaccacatccacttggtcctaacagggttacgaattcattttcatatatgtccagattgattccttttaacacaacctgggtgtcaaagcttttcacaatattgcgaaattcaattagttttttctcttccatttttcctctcccttctcagattttaaagccgcaaggtatcgtttcataatcctcattcttccttacatttgcagctgcgcttctcttttctttaaaaaatcggcggtgtcgtgatccacaatatctttgccgggctgttaccgtgattgtaaagataatggctcttcgcaccatccatataaaacgtctcatgcgctttcactttatactttttgccaccacgcacgatcgtaatatttcccttcagtacatagccaaattcctcgcccgtatatgacgtctggacatggctctttttatgcggatagagtgtcataaggatcggctccatctggttcttctgggcattcggaatgatccattccacctgataatcttctttctcgtctacgaagaaatcatccaccccgaatacgatctgcttttcttcctcttcatgaaagaattccgacaggttacttccaagtgcttccagaatgtcctccagtgttgcaatactcggtgccgttaagttacgctccacctgcgacaaaaatcccttcgtaagctcactgcgcgaagccagatcttccaatgtcagatcgttctgctttctaagctccctcagcttctttccgatatccacgctttcacctccacattttcaaaagttttctattactatacttttttttcaaaaataccgaacaagattcattatacacgtgtatgtggataatgcaagtgaaatgcatgtaaaacctcgacataaattaaaaatatgctataaggacattgcttgcccggaagtctgtggtccgcaatgccgcttacggaacttgtgatcgcagtatatgtggtgtatcatatgcggaaatatacgtgttcactgccgggataatgtgttatcattaaccatagaaaattttccagaggtaaccacatgaatacagcaactacagcaaatattcaaaataataatcctactgccttttaccacctcccaggcctgtttgaattttacgaattgtaccgcatattccttccattattccggaaacacagggaatatttttacgactggtgtgagattggctcgatctatggcgctccttcggattgtatctggggcggcgggcgtacttcatttggatattctgatccggaagacgtgcttgatctggtgcgggaatacggcatctcggcccggctgacgttcagtaattcgttgctacgggaagaacatcttacagataagaaatgtaacgagctttgtaaaatgttcgaacacgcctctgatgctgataattcaccacatacacatcaactccagaatggcgtgatcgtgcactccgagcttttattaaactatttacaaaaaaattatcctgatctctaccttatctcttcaaccacaaaagttctgacagattttcaggattttttaactgaaataaaccgagaagatttccgttatattgtaccggacttccggttaaacaaagtattcgataaattagacctgatgtcgcagcaccagaaagataaagtagaattcttatgcaatgaatgctgctggttcggctgtaaggacagaaagacttgttatgaatccgtcagccggaagaatctcggaaatcctgccccggagtttcactgtgcttcgccggatggcggtaacggttaccgcttttccaaggcaatggaaaatcccggattcatcagtgtggatgatatacaggatgtttacatgccaatgggattttctaattttaagattgaaggacgcgggcttggaagtgcgctgattcttgaatttctgctttattatatgacgaagccggaatatcaactgcatgtcagggaagagatttatctggataatatgctcgatcttttttagccatggggacagggtttttgacttttttattgtcccttccgaatcaaaaatgaacgcaaaaaacctgcccgtcggcaggttttcttacattctaatctatttttattttcttttgcttttctatatctcaaacgtctccagatcatccggcacatacagattgccatgataatactgctgtccttcctccgtatacaacttctttctctccgccagatgtgtctcttctgtatgatacaacaacagattcggcacaccgagttcttccgcaagctggcatgcttcttttactgtactatgatgtttctcataaggcttgaatttatccgcctcaccgaacaggcagaatgcctcatggagcagccagtcactgtccttcacatatttataatccacctcattgtacggctcgtcaccaacacaggtgaatttcttaccgctcttaagctgcatggtgaatccgaactgtttcgcctttgtcgaaccaatgtcgaagaatgtcacaggacatccgagaatcgttctgctgtctccgtctttcacgacatcaaactggattcgctcccccatatgcttacagaccttctgctggatcgtcatatttgcgattgcctgaatcttctctgccagctcctcatggcagtaaatgcgaagatcaccttcatattttccctggttcattctctgtccgatcatacgcaccagccagataattccaagcacgtggtctacatgctcgtgtgtaacgaagatatcgtggatatcattcatgtcgattcctgtgtcttttaatactttcagaatacggttgccaccgcctgcatctacaaggaaatgtttctcttcatcgctgattgcatagcaagtattataacattcacttaccgttgcatttccggttcctaatattgttaatttcatatgcttttctccatttctggtttttgtaccgctttttcgtagtacttctatcagcagtatagcatatttttttcaactggttatgtactggattttgaaataatattcattttttctttttataatataaatgtgctaaatatttacaacactgttgacaatttcctcaaaatctatcttacactccccatcataaattccaaccggcacttccccatccattccatatatcatcagatccatattttctccaaaatcatctcccagatcatacacaattaccttctgatttttcacatccgcaatccagtattccgcaaagccaccgcaatctcgaaaacaatctcctgatgtgtaacggcaggtgctgccatgtcatataaaacgccatcgatcaattcatatctctggtcatcgggcagggcatagtaatcctctaaggtatattccccctgcttctttacctgatatgctcccagcgcttctgctgctttgttcttatctgcttttacaaacactttttccaattcacggatttcactgtaagtcaacaggtcatagaattccttttgcccgatctgctcttttttataaaatatttttgcagccagttttatatcaatacctgacttttcggcgatttcttccagtgtatagcctttttgttctttaaagaatcatagtaaaaagcgaatgcttttttgaagtaattgcattgtagcacatttgttttatatattcaagggttaatatatttaattttattttaatcgtataacaaaacaaaaaaagccattggggacggaggaaaatccgttttccacgtccccaatggcccaatggcctacacttctttaaacttcggatgcttagacaatgctattgtcactgcaaatccaacaacaagtgagatcagaattccgatcatataattcagcattccgccggacttaatgcatacgaatccgatgattcctgctgctcccggggagatattctgaacatttgtcagtgtcacataagcacatcctacagcagaaccgaacattgctgcatagaatggatatttcatcttcaagttgactccgaacattgctggttctgtaataccaagcagtgctgagataccggaagaaactgcgatgctcttcatcttcttatcctttgcacagaacattgctgccagtgttgctccaccttgagccacattgttgcatgctgcgattgcaaagaggaaagatccgcctgctgcaatcagctggatatcaaccgggagaagactgtggtgcattcccgtcattgttaatggtgcatagataaatccgaaaataaatccaccgacaacacctaatgtatcatggagccacagaacaccatttgtaatccagtctccggctgtacgcatcactccacctaccactgtaaatgtaaggaatgctgttacgagtacggaaagtgcaggtgtcaggaggttgtccagatattccggaactactttgtgaagtttcttctcgataaatgcaaggattgctgccgctgcaagtaccggaagtacagttccctgatatccaaccttctcaattgtcagcgctccgatatgccataccggaaccgttccctctgtaatggctgtaccataagaatatgcattcagaagatcaccggataccatgatcattcccataactgctccaagataaggattgccaccgaacatctttgttgctgagaaccctacaaggattggcaggaatgcatatgctgcacttgcaaatgtgttgatcatagatgcaagatctgcaatattcggatatacttcaacaagtgactttcctgagacaaaaagtccttctgctgtcagaacattgttcagacccatcagaagaccgctggcaaccagtgccggaataatcggtacgaatacatccgccagcatctttaccagtttctgtaacggattcatcttctggtcagcagcctttttcacttcattttttgtactttctttgatgtctgcatactgaataaaatatttgtatacttcatctactgtaccacttccgatgatgatctggaactgaccgcctgtggaaaattgtccttttacaagctctgtcttgagaattccatctacatttgctttgctctcatcttttaataccagacgtaatctggttgcgcagtgagccgcgctgattacattttcttttccgcctaccagacgcagaagttcacttgctgcattctggtaactctgctctttactcattctaactcctcctgtaacttcatttcttttctatctcaatcaggattttcttagtaccatcgttgtacttgaaaagtcctgtctgattcttggtattcggattcctgcatacatcagttcatccccgccgtactcctgcccggtctcacaatctgtgtaaactgcatccggatccagtccttttaagcgaattaccggaaccctgtaggctgagcgtgcaaggatctgcacgtgagtgaagatgacttccattccatcttctgaaacaatattccaggcactttgattctcctgaaatgaatctgccagccggtaataagttccgaactgtacggttcttcgtctccttttatattctgcaatctgctctctgacttctttcttctcttcttttaaaagcttcttcaaatccagttcatacccaagattgcctgctgccgccacggcaaatcttgtagcaagcggtgtggtccgtccgacctgatgattcggacatgctgacacatgcgctcccattgtaactgtcggaaacagaaagcttgttccatgctggattttcagcctgcagaccgcatctgtattatcgctggtccatgtctgtggcatgtaataaagcattcctgcatcgaatctgccacctccactggaacaactttcaaacaacacctgtggaaaacgttctgtcaatgtctccattacctggtaaagtccaagcacgtagcggtgtgaaagttcattctgattttttctgtcaagataagcacttccaagatctgtcagatgccggttcatatcccatttcacataactgatatttcccggtaccaacaccttactgactgcttcgatcagatattcgcaaactgccggattcgacagatccagtaccagctgatgtcggctgagtattggttcgtaaagcggacttcggatcacccagtctggatgctccctgtaaagatcactttcccttgaaatcatctccggttcaaaccagattccgaaatcaatccccttctgtttcaccttttcggcaagactctgcaggccatccggaaatttcttcttatcttccgtccagtcccccaaggaagtcgtatctgtatttcttcccttgaaccagccatcatccatcaccagaagttcgattccaagctccgctgcttcttccgccagcgtcagcattttctcttcattgatctcaaaatacataccttcccagctattcaatagaactggccgttcccggtctctgtaccatccccggcagacgcgcgttctgtataaccgatgaaatatattcgacattccggcaagtccatttacactatagaccagtacagcctccggtgtgcaaaagcttgttcccggtgcaagctgccatccaaactgatacggattaattccaagctgtaccctgattgttccatactgtccacactgaacacatccatagaagtttccactgtaaatcaggtttactccaagcacttccccttgctcttccgtagtcccgggacttaacaatccgataaatggggttgcctgtgggctgctcgttccacgactgctttcaatcgtgactgaatccgcacacaatggacgtcgatacacgtttttctcttctgtatgtgcaccggataatgtcagtacatcatattcctgtattggaagatccatgttcatgcttaagaatcgacagatttctatcggttctgttccgtcattgatccattttgcgaatcgtgtgaccactgcatcttcatagatggtgtaatataacagaattctctgatttctcaccttatcctgaagcgtaatctccagtgtcattgcctcggtgtccgcatcagtatagacatgtggcaggccatccggagcgatctttccactcagaatgcgatagccgttatagaaaaatcttgcgtttttatctccatttctatcttctagttcgtaagccggacttcggaagtccccctgtccggactccggaaattccctcaactgtgtatccagagaaaatgtcctgtcttcctctatcggattcgcacagaatccacggtcgtaataataatccttgatgccgctgtgccatctctttattctttttccgtagtaacaatgctttaaatatcgttgtttttctacttgaatcacataactgatcttatcgttgtatagatgaaaaacctgctgttcttcctcaaaactgatctgcattctattcctccactctctcattctgcttcatttcatcgcttgactaaatgcattataacttccatctcttttcactttcaatggtaatgcagattagcaaatggtaattattttggcaaggtctttcgaaaagctttcggaactacaccaactcaatatcggcttcaaaatcagaactatgatcttgtccgcgttctccatgattcgcatcccaggatttcatctgataaataaccgcctcatatggtctgagttctgtaattttttccgcggcaggcgtatctgcataattactaagcatgacctgcccggctctcttacactgtaactttcttgtcttctcatgaaagttacagacaatcagccatttttcctcctccagcgttcttgtatagatataaaggtcttcatcctccgggaacagcagttgataagttccgtataccataacttcatgttctttccgaagctggatcaatttctgataatgatagaaaacggactctggatccgctaatgcctgttctacattgatttccttataatttggattgactctgtaccatggagttccttctgtaaatcctgcattcttttcggcattccactgcatcggtgtccttgcattatccctcgccttcgcccggattgcatacatggtctcttcctctgtgaatcccgctttcaggcgttcttgataaatgttctgtgtctcaatatcagggaattcatcaatcgtctgaaatggaacattcgtcattccaatctcttccccctgatagatatacggtgtccccttcattccatgaagcagtgtcgcaagcatttttgcagacaggacacgatagtctccgtcatttccccaacgggaaacgattcttgggagatcatgattattccaaaataaactgttccatccatgaccttctaactctgtctgccatttgctgaaaacacacttcagatccggcagataaagtggtttcaaatcccatctttgtccgcccggtttcttatccagctgaatctgttcaaactggaagatcatactaagttcttttcttgccggatcagtatataatcttccgacctccggggtcgccccccagcactcaccaaccgtcatgctgtccctgtgaccaaaggtcgcttcgttcatctcttgcaggtatttatgaagcatcggcccattctctttgatcttctgatccggtatctttccaatcagatcaatcacatccatacggaaacctgcaatcccctgatccagccaccagttcatcatgtcatatatttcctgcctcagcttcgggttctcccagtttagatctggctgtttcttactgtaaaaatgcagataatactcatccgtctccggcgaatactcccatgcacttccaccgaaatttgacatcagatcattcggtggctgtccatcttcacctttcctccagatgtaatagtcccggtatggattatccaggcttttctttgcttctatgaaccatggatgttcatctgatgtatggttcactaccagatccataatgattttgatatcattatcttgacatttctgtatcaatatcttcatatcttccattgttccaaactccgggtaaactgtacggtaatcagagatatcatatccattgtcatcctgcggcgactgatagattggacagatccagagtacattgactcccagttttttcagatattcaattttccctgtaattcctggaatatcccccattccatccccattgctgtccgcaaaacttcgaggatagatctgataaacgacactgctctgccaccatttcttctccatcttatgtccccttcttgctttttttattcgaaccaagtataatacaaaaaataaaaagatactttcattattttatcaaaaaataacacaatattatgcaacagttcagctacgcgtctgtacaagaaaggagatctctcatgtcacgttccttaaaagagacaaattttcacggaacccctatgttccccttacagatttattctcataaagataagaacggtttctattccgttactgcccactggcatgaggaactggaatttctctatatcgaggaaggaactatgcgcggaatcatttccggaaccccttatgaaatgaaagccggtgaattctatttcatcaactctggtgaactgcatgaactaagcgcacacaaccattccctgcatcatgcaattgttttcgatcccaaattacttaattttgatttgtatgatgcctgtcagcacaatttcatccagccaatcacacagaagaaactactcttcccaaacaacatctccaatgccctcagtcagaaagaacgagaaaatctccgacagctttttcttgcaatgatctataattaccaccacccggaacgatgtgcacttctcaaaattaagatctgtcttctgcagattctggaactctgtttccgcacagaaattcttatacagaaccagactaccggaaagcagctctcctccataaatcagctgaaggaagtgcttgattttatccggtcacattacgccgaagaaattacattaaaagaacttgctgacattgcctgcatgagcccgacctatttctgcagatatttccatcaggagatgggcaagacaccgtttgccttcctgaatgaataccgcatcaaaaaagctgccatccttttggatgacagctcactgtctgtttctgatattgccattaactgtggctttgacaacatcagctatttcattcgtaagttcaaagaataccagggaatcacccccaaaaaatacagaagccggaagatgccagaataaataaaactatgctgcaaaactagtagaaaaagagacttctcccaaatattatttcatggatacaggacttcttggacttatgttactagactgtaaatctgcccaactggaaaatcttgtcgccatcgaattaattcggcgttacggagtagaaaatgtttacttctttgaaaataatgtggaaatcgacttctatgttccgtcagaaaatctggctatccaggtcagtatgcaggtattagataatatagatacacgagaacgtgaaacccgtgctttcgtcaaattaaataatttcataccggactccaaatgtattctgattacaaatagtgaagaggctgttcttgactgtgaaggaattcgtgttgaagtgattccgatctggaaatggctattgatgaatgatttgtaggagccacgaggaacactaattccctgcttttttattgttcccgttgactctaccaggaattttcacttgactccaattttatttttctactaaactataaaaattacaaataaaaactatatataaaagcacttacagtacttaccaactatagtttcctgtaagtgctttcccgcaggtggcagcttcttccgtatcttttactttctcttgtatcttttattattcctccgccaactccccaaactccgtcttctcaaattcctgaatggaaatatgtctcttattcgggttcgcatacacgaaagtcttatctacattctccagatagttctggatcttatcgttcgtcgcgctgatgatcgcctggaagccaagtccgcggatcagcgagatacagcttgccaccttctcggcatccatcttggagaacgcctcgtccaacacaaccagacgcagtgtcggtgaccggtgcatcttcggcgacagattgatcttataaagctgcgcaaagcttgccagaagtgccacgtacagcgggttctgtccctctccgccggagttcttcttgatcatcttactcagtccgatcgtcatctccttatcgccatgtacgatctgctgcatatcgaatgacagataggttcggtaatccgcatacttatccatgttgcgtttcgcctcatccatctcgtccttcgtcgcattctccggcgggatgaagatgttgatcagctcgttcatcatctccccatactggttctcatgctccatcgtgaacatatcaagctggttgtccatcgtatcatctaagtcagacggacggatctgcagggaatcatccatgaacatcttataatattttccatctgcacccttgttcttcgtgatcacgaactgatacttatccttaccgaagtccagtttgctgatgatccggttcagctcatcccttctctgataagcctccaggatcgcactccgaatcttgaagatgaagtcatctttgaaatgctccacagccgctttcgcctgtgtcttcgccgactccctgtaagtctccagatgatcgcaggacagcgaattcaaaagcttctcatacggcgcgttgtcccggatagaagttgagaatgtacggttcggatattctctgatataaccgcttctctcttccaccagcttccggtaagcgtcttcctcttcttccctgagcgtatatacccgcgaaaccatctgacgtctcagatactcataattctcggattttctgctcgccagatattcctggaactccttctcgtaacgcttatctgctacttttctcttcacgtcctttatctgttcttccgattcgagaacttctgcattcagacgttcgatttctttcttgttctcccagattgcttcctgcaccttggatacggattctttcttcacatcctgtgccgcctgcacttctttcttcttgccttcccatgcagcaacggattcatcctttaacttctgcatctgttccagaagctgagcctttttcttttctttggaaatgattgccttgctgtcagccagccatccgagataatcctctgccggctgcttcaacatctccatctgcattgcctggcggatctcttctaacagctcctgtaccggcattctctcgccatttaacttctcacatttttcttccagcttacggattctctggcgcatactcgtctcaccgatgtaggctcttctggtgtaattctccggattcatgtgctgcagtttgtagctctggtacagcatacagtccggtgtcacaccgatcctgcactcacgcagttcatccagcgattcgcatttctttacatttccaaggaagaaattaatgtattcctgcacatacgcttctttcgcttttactacttctgccagcgcgcccggctgtacctgatgcttgtccttcgtaagcttctccgtatccaggactgctgcccggaagaaacgtttcgtatccatctcctggtaaatgtccatcgcagccctggcatactttggttccacgatcagctgcaatttattatttccaagataaccctccgctgcattgtgccatctctcgtccttcacatccagaagatccgcaagaatatgcacattcacgaacttgccgcagcgctcatgcagacggttacgcagttcgaatctcgcctcttccagctctctcggataagccttctttccctgcttcagttcttttaattctgctcttgcctctttctcttctttcttgatccggcgaaggtctgcatccgcttcctgtctctggtcttccagctcctcctgcagatcttttaagccttcctgcaggcgcacaagctcttcttcggaaatgcttccgtctgcgaatttttcgatatcccagatcacctgatttggcgtaatgtctttctccgtccataccttcagatgctctgcagtctgctcccagcggacttttccgttattcaggcgctccagcgtctcatttaatgtatccagatctgattccagccttgcatacccactgtctgcgatccgcagaatgatctcttcatactctttctgcaagtccttttcttcctgctccagcacctgttgctgcttcttcagatcttcgatggcttcctgtcttaccttgatccggtctctggcttcctgactctttacctcatggttcatgatctccagacggtcgatctgataagagcacaccttctcctcatcagatttttctgcatactgctcatacttttcacagatcagcttcagtcttctgatctcctccatcgtctcctcgatcttactgcgcatgcgtccatactgcatgacgctttcctgcagatcctcaatatggatatcctgctccatacaaatatattcctttacgaaatcttccagtttgatattcatacggaacgagatcgcacgtttgaatagctttggaaatttttccatgtccagaccgccaagatagatatcgtatagctgtctccggaatctttcattgctcggaccgcagtagaactgttccggcgtaaaggaacgctgcaggtactcacgcatttccgcagtggtaaggcaccggccttccgaacggtaatgattcggaagtaattctcccgtatgccagaagaacaggcggcttacatcattattcgacgtatccacgtcaaacacaacaccgacacactgtttatctctggtattcgtctgtgtcagctccagcacgatcgtactggaaaaattacgatttcttaaatactgtgattcattattttcactgatattcaccatacctcttaagtactcgatcagtgtacggtccgaatcatctgctgccgccttgttgaagaatccacggccgtccgtattagcatacagcacgatctggatcgcatccagaaccgtcgatttaccgcttccggaatgtccggtgaagaagttgattccttcattaagcgtcagtatctttttatctatgtaatgccaattattcaggcatatcttcgagagtgctttgaatggctgcttcgtctccaatttgatcctcctcactgaatgtcgctaataattccctgatgtcgtctcctaaaagtaccgtatggatacaagggtagatgaccaggcgggtcgactcgtttaattcttccagaacatcaagcggctcgatgatctgatacttcttcagaagtgcgatcgtccgtctcatttccgtaattgacggaagactcttcaatacatgaaattctcccgcttttccgtttactgcaccaagtgttgtcaccacatggctgctcgacgatgcagtctgcatctgctcgtcatagataagcttcagcaccagtaaatagatcgtcgccagacgcggcagcttctcaccccataactgctctccctggatatagatcacacccatatgtacattttcccgcagtatgatccccgccacctcaaaatatgctttaaaaaattccagatgcttcgtacaggtacggtattcttttgtatactgcatccttcccgcacgtttatcaaattttctttccaggagaaatgtctgacggtacagtgtctggatgacctctgtgacctcttctttttcttcctgggttagctgttcgtagtaatctatcattattcttagaactccttttatcagaacttctttatattatgttcatcacttttctttctgttttgcattacaaattattacacactattacgcccgtctcttcacgaatcttaatgccggataccggtatccggcattttccaccatctccggttcctcttccaacactttatacttactattcttacgtgtactgtaatcatacgccaaaatcaatttttcaaattcttcctcatccgcaatattaatcttcgacgcatccatcacttcatcttccatattattctcgatgaattcttcgatctgcttcttgctgaaccgcatctggatccggttcagtcttaagatatcatccttatccagatctcccgtcgtctcatccggaaggagctggctgatgaagtcttttctggattttcttctcttatataaagacttctccgacagaatttccagcagcgacagattcatgcgctttccggtctctgtgatgatctcttccatctgatccggatcttccgacattttattcagaagctgtaccaccagacctttcgtatctgtctcaccgcttaacagataattcatcctcgttaccgtcgcacggacgtacttcgtatgttccttatccatattagcgattctgtgctcaatatcatcaaatccccgctcgatcagatccagcagatccagtacatcatcctgattatctccaagcatcttcgaccgcgcctgtaccttcatgataaatgcctcatcatcccggatctctctcagacatttcttaatatccattttataaatgtaaaagttatccgacgtcttcagaatatgatacttcttccacacgatctcttccacatagctgtccagatgctctcttaaaatcccgctgtacgaatcctgctgtaaaagttttgcaaaaaacttgttcatgttatgaagcatgtcctgcagtgccttattcagccgtctcgtattcaccagtgccgtcctcaaaagcccgatactcgccctcggatcattgcgaaatgcatacagcgtcgcatacacattctggatataaatatccgtctccgacgcatcttccgaattcagcttttcaaatgcatcgatcatcaccgccgcataatccggaatgacaatattcgtcactagtgtattataatcctcgatacgcttcagccatcctgcccgcagaagccagtttaatatccttgatgacggcgtctccagcatatcaaaatccgtatcattttcctcccgctgtaactcaaaccgtttcttcacattcatatcacttaagatctggatgcacacctctttcgtcaggaaatagttattatattcgtattcttcattaatacataaaagtgcttcaatataaatatcccggttgaccgaacggaacagactccagaacgtatccgggatttcattcattaactgcatcttgttttcctccaaatgattccttacaattttaacatttttaagggcttttttctactgcaagttattttccgccgttttatacactctttatttgttttttatcttcatagctgatatgataagataataaagataaaataaaagacaacatacaatataggaatgaatacggaggtaaaatcatgtccgaaaatatagaaaaagcagtaccgacagaagaatcacctaagactaaggaatctgaaactagcgcacctgctgccactgacaacgttgtgctttatcctgttgctgatatatctgctgcgcaggaaactacagacactgaaacggctgcttctaaggaaattaccgacccccagaacacagataatcaaacaactatcgacagcaaaactaccgacggtaaagcttccgataacgcagacaaattcagtgacacccgaaatacaaaagaattttcgaaaaaagatgcggaagaagacgaagacctggaagaagacttttacgaacaacaggaaaaatcccgctccaaagatgaacatccgttccgtgagttcttctctaatttccgttccaaacgcaagatcgaaatgaaccgcgatgagcagatcctttcccgcatcagcgatgaagatctgatggaatatctccgtatggaacagaaacgtatggaactccttcagcaggcgaaagaagtccgcgaaaaaagattctggaccacattccagctctttatctgtctgttatccgttatccttgttatttattttctgaaggataacccggtaatattagtcacgatcctttacacggtcggaattctcactgctctccgcatatggagcaaatcccagaacggaaaagaccacagagacaaaaaagattcctcagattatcataagaaaccctgggaataattacattttcccgtgacattttaccacatcacacgatcatgtcatcatacccgccagcactacgctggcagtcacaccagccagagttgcaagcagcgcacccgtcaatgtatagcgcgtcttcgtgactctggctgtcatataatatacactcatggtataaaagatcgtctccgtacacgacatactgatcgatgcaatccgtccgatatacgaatctgttccatattctttaaaaatgtccagcaaaagtcccgtcgccgccgatgaggagaacatctttaccactgtaagcggaaccagctctcccggaaaaccgattctgtccgtaaatctcccgattccatttgcaatcagttcaagaaagccggacgctctcaatatccccaccgccaccattaatccgacaagtgtcggcataatcttgatcactgtcagaaaccccttctttgcacctttaataaacgtatcgtataccggaactttcattaacagtccataacctacaatcccgaagattaccagcgggactatgaaatctgtaagatataacaatatttgcatattaacattccttctttaaattatcctcttacagtttattctattggcttgtcatatattaatatataactgagattggtgcaatttccggcagccccttacaaacgcatggcgatttatacagtcatattttccacactgtttgcatattatacttcagatatccacatacaggagtctcacttatgctgaactacctctggtcttttatgattcttacaggcatcgtatacgccgcattcacaggccggatgcccgatattacaaatgcagcacttgattcatccaaagaagccatctcactttgtattaccatgatcggtgtcatgtctttttgggtaggactgatggaaattgcttccaaagccggaattatcccggccgcttccagaaagatccggccggtcattcgtttcctttttccaaatcttcccgccggtcaccccgccgaagaaccgattaccaccaatatgatcgccaatatcttaggtcttggctgggccgccactcctgccggattaaaagcaatggaagaattatcgaaattagaagaacagcgccgcaaacatctggctcccggtatctcccgccctgccggaacagcaagtaatgaaatgtgtacattcctgatcatcaacatttcatctcttcagcttattccgatcaatgttattgcttatcggagtcagtatggaagcgttaatcctgcttctattatcggagccggtattgtatcaaccctgatcagtaccgccattgctgtcatctactgtaaattgaaagaacgatgacgttttcaaaactgatatcctcttcatccacaataaatgatcacattcacaaagttatccccatttataaaatatcctgtggataaatattcttttgtcgtaatttaatgtagacaacttcacggaacagtgcatataccaccgacatcaacggaataaatatcagcattccgacaattcccatcagacttccgccaacactcactgctgccagcacccagattgacggaagtccaaccgaatttcccactacatgtggataaatcagattcccctcaatctgctgaagtaccagaaacaacacaatgaatatcaacgccttaaacggactcaccataaagatcagaaacgccccgaccgcacatccgataaatgctccaaaaaccggtaccaatgccgtaaatgcaatcacaattccggtcaacagtgcatatggcagtctaaacagtgtcatcgtgattacaaacattgctccaaggatcaaagcctccacgcactgtcccgtcaaaaaaccagaaaatgtcttatacgtcagagccagcacttccaatacagcttctgctctccccttcctgacaaacgcaaataatacttttttcgcctgtcttcccagtttctctttctgcagcaaaatataaactgcgaatacaaatgcaataaaaaacgttcccactgcaccaataatattttttgccgtattaatggtagtctccagcacacttcccgctccatttttcagaaagcctgccgccgcttccataattttattccagtcaaattccaggttgttcacgacattcataatttctttattattatggaaccagtgatctgcccacccctgcacctgcgggataaactcctgaatactctttcccagattggcaaatgttcctgccaattgcggaagcagcccgaatattatcattgccagaattccggttacaccggcaattacaagcatcagactgattcccctggcatattttcttttatatttttcagaaatttttctctctgtaaataatttccgttctacaaagttcatcggtacacttaaggcaaatgcaatcgcaccgccaagcaaaaacggatatactatatttaatacaaattgaaacgcatttatcacaacatcaaatttccacagacagacaatcagtactgccgtaaatatgatcaatcccctgatctgcttcactgtctcttgttttaattccattttgtctttcccttcaaatacttcaatccctgaatcacaggaagattcagaaatgcaagaccatatactgtcatcagctgcgtcatatttaacgtaacaactttaaacatggcatgtaatcccggaattgtaagaacacccgtgatcagaacagtacctaagacaaatgctccgatcagatatttattattaaagaatctctttgagaatattaccggcttatcgtctttgcagttaaagccatgtaccagacggctcatacacaatgttccaaacgccatcgtacttgccagaactgcaccctgtcctctgtatccgatcaagaatgctgccattgtcataatcccgatgcacagaccttcggttccgatattcaccagatatgctttcgtaagtattgactcattcacaggtctcggtttctgatccataaccgctttagaatgcggttccatacccagcgcaattgccggcaggctgtctgtcaaaagattaataaacaacagatgtaccggggcaaaaggcaccggtaatccggccgttgctgcatacagtaccgcaagaattgctccgaaatttccggataatagaaattgaattgcatttttaatatgctgatacagatttcttccattttccactgccttcacgatcgttgcaaaattatcatctgtcagaaccatcgccgccgcatccttagcaacttcgcttccggtcacacccattgcaacaccgatatccgcctgttttaaagccggcgcatcattcacaccatctcctgtcattgccacaatattttccttttcctgccacgcacggacaatcctgatcttatgctccggagagactcttgcgtagaccgagattccctctacaaagtcttttaaatcttcatctgacatattttcaatatcagcaccttcacaggcttctgactcatcctttaatattccaatcctctttgcaattgccgcagccgtgactttatgatctcccgtaatcataatcggccggattccggcattcaggcactctgctaccgcaacctgcgactcttctctcggcggatccatcattgcgatcattccgataaatatcagatgctcttcatcctctgtaccgatttctttttcctcttccagatgtttatatgcaaatgcaagaactcttaacccttctctggaaaactgcatattctgcatggaaatattcttacagtcagaatctgtcatctttcttacagtatttccaactctgattctgtccatacgatccagtaatacatctacagcaccttttacgatcattatatgatcagccgttaacatcttatcatcctgaatcctatgagctgtcgacatcaatttccgctcactgtcaaatggaacctcagacaatctcggatatcgttcccttacctgcataatctcgattcccagattacttccgagattaataagtgccgtttccgtaggatcaccaatctcctgtccgtctgtattcgttgaatcattacacaggatactgaatctcaaaagcagtttttcattttcatttttcagattaatttttccggccggtattctcttttcatttacataataatcctctaccgtcatcttattctgcgtcagtgtccccgttttatccgaacagacaatcgatacactgccaagaccttctaccgcctgcagttttcgtataattgcatgttcttttgccatcttctgcgttccaaaagataatacaatcgtcacaatcgaactaagagcttccggtatcgctgcaactgccagcgcaacagcaaacataaacgctgaaccaatagattctccctgaaatacatttaccccaaatattatgcctgaaaatacaagaattaatatcgacaatttttttccgaagtcatcaagattcacctgcagtggtgtgcgcttttctgatgtattcttcataagatctgcaatctttcctacttctgtattcatgccgattgcagtcacttcgtatcttcctcttccatacgtaacaaaacttccggagaatactttgttcgtctgatcgccaagtgctgttccgactgcgacttcatccagattcttttcaactgctatgctttctcccgtcagtgcactttcatctaccttcagacttgcacattctataagttttccatctgcaggtatacaatcccctgcctccagtattacttcatcgccaatcgtcacctctctcgacggaatctgaataatatttccatctcttgctactttcgcttccggagcagataactgttttaaactgttaagcgattgttctgcctttacggtctgcaccgttccaagtattgcattcatcgtaattactacaaaaataacaatcgcactttctgcatctcctaagataccggaaatcactgcagatatgatcaatatgataacaagaaaatctttaaactgttccagaaatatctgcatgatacttttctttttcccttctaccagttcattgaaaccatatttttcctgattctcccttgcttgttttgttgtcagcatatttgttctcctttctttctttggccaataaccctttttaatttttgatatatcgaaagtatacctagaatctgccaccgtcaacttgtattacatgcttttgctttggtataaaaaaagagacttttattgcataaaaactatgcaataaaagtctcatcatttcattacgatacggatagctcttttgccatcgtactgacgtcatcgtaaacatctatatcttccattcttacatctcttttatgaaatatatagatgccgattactccctcttattaattataatataaccacttcaataaaatatgtcaatatatttcaataacaaagtatgcaagaaaagctaccggttgccaaagcatccgtaatgagctgccagtggcagatcatgtaggtggcaagttctttaaataaaaaaaagaagtagtacttatatactacttcactctcattccatgagcgtgcggggattcgaaccccggacaacttgattaaaagtcaagtgctctaccacctgagctacacgcccttattcctttcgcaaggaaaatgcccagaaccggaatcgaaccagtgacacgaggattttcaatcctctgctctaccgactgagctatctgggcatacacaatattttgtgcgagttgcgggggcaggatttgaacctacgaccttcgggttatgagcccgacgagcttccagactgctccaccccgcgatattaaattaagtcttgtgacttaaagccgatgatcggactcgaaccgataacctgctgattacaaatcagctgctctgccaattgagccacatcggcgagtgccttacggctaatggatggaggtggattcgaaccaccgaagcaatttgcagcagatttacagtctgtcccctttggccactcgggaatccatccatattctttttatttgatgggaccaatagggctcgaacctatgaccctctgcttgtaaggcagatgctctcccagctgagctatgatcccatacaaacgacccagaagagactcgaactctcgacctccgccgtgacagggcggcgctctaaccaactgagccactgggccatcttttgttgtacctatgtaccttcaaaactgcatacaagaaatattttctttcatcctacctatcaccttgcttggtcatgccctcgaccgataaataattccttattacgaaacattataaaatttaaactctttagaatcaatatatatgtttctgtattacgaaactttttattttataaggggagttcatcattatgcaaaagattagaccagatatggatattggtaaaaatatccaagaaattcgatataaaaacaatatgactcaagaccaagtagttgcaaaattaaatcttatgggtatctccatcaccaaaagtacctatgccaaactggaaacaaatcgcatgaacattaaggcatctgaattagttgcacttgcaaaactctttcacaccgatatcaatgcattcttttccggcttgctatagttcgatattccccaactccctatgtatataatagcatctaaaaaataagaaccagtctatattcttatcggatataaaccagttctctttcttgtcaaacatttctttatattgtaattggatatcctatcctttatcaaatattgtactatatttacctttttaccctaaattattcctttgactctagtctgcaatttgtaaaaatgaacatctaaaaatttttctaagcaagaaggagtaattgcatactgacttaactcacttaatctgtttgaagtaatattaatatgtacattattatatttttctgaaaaatatccaccgacattattcagttcctttaatcctttaataaaagaaacaaaaaaatctaattgatttttccctctaaaattcatagaaaaatttccctgttcatttaatatattttttgctttttcaatatcttcttcgctaaattgtaacttctccttaatatcttgaatagtatctacataacgtgaagctctctctacttttgcaacttcaaccttcgcaatatgactggttttaacagaaccaaatgcacaattactatttgaatcggatcgttctcttcttaaatatgctaatgcgttaaattccaaaatacattctttaaactcatctgctctaaaccgaaaatcttgtaaacatttttgaaaatcctcatctaccatattaagtccaaattcagattgtagaattttctttaaacattcttcttgtgcgtacaaattttctatcgaatagcaaggtgtctcaaaaatattctcctgttgccccagtaaacttttatcgtaatcacgatcaacaaaaaacattgtacacacatctttatataagtcttccgaattaatcttttttaacaattttattacttcttttttatttccaactatgaatgtcataaatttgtccgaaaatttttgtctgattcttgggtcataatattttccgtcttctccttcataaaaacaaaacgcatacgaattataatattttctattattcacaaactgtataaaaacagcttcatatgttccgcgtgattttctcatttgttctaaaagagaactttttttatcattcgtcattgcctaacacctacctatacatttttatataatttcttatttcttttgcatcaaaatcaaactcatttgcaaaagtaaatggtgaatgtgttactgtaagcaataatttacaattattcgttctcatgatatctggcaataacatctgctgccattgaatagacaaagataattctggctcatcaatgattactatacttgattcatcactttctaaatataattttgaaaataatgatacaatttgcttttctccagatgatagttgtgttaattgaattgtctttctttcactctcatattcattatctaaatatatttttagatttaatgtactttgattatagtcaaaatgcttatcatttaaatatttattacatgtactagcaaatttttttattctatcatcataggacttctgtatatcataattgtctataagcttattaattaaattcctaagatataaatacttgtactccttaatctcgccactactgattaaatttaaaattttttgtttatatggttcttctatttcttttcctactcgatccaatacgatttttacagtatctacatttacattatgcattcttgtaaattgattcatctcatcaatagggtcttttccatctgcatattgtcttaatagaattcctgtcatttcagtaaatcccttcattgccaatgaacgaatcttatctaaaattctatcaatagacatttgtacatctgacataccaaatctaattaacagctctgccttatttaattcttcacttctaatattcaatgaagcaaaatcatcctcaattctcctatatgtcggcaagtaaataattctatttgtaactttatcttttactgccttagacaattctataacattatttttatttgcctttcgtttactatttgatataatttctgtattttcataatattctaaaatacgtcttcttgcgaaattttccggtactcgcattttacttgcatattcatatataagaaaatctagattattttccatctccatttcagacatatttaatttatttttcattaaaatgtcttctaatatttccatttcatatatatcggtatctcttataaaatggttataagcttgtcttctactttttttattaaattctcttaaatcagctcccgaaattttatatgtctttacgtcccctttaaatttaactattatttctgagaactgaatatttgccaatcttgaaaatttgccctccaaaataaaatatatacaatttaatatcgtagttttccccaaaccattttcaccaatataaatattaacttgtttttcaaatggaatttctatactatatcttccaaaaagtccataaatccctataaactctaaattcgtttcattcaatttattttccactctcatttcattaaatatatcatcttggaacattatatgccctccttttatgctttatattaatttttattataacaacatttttttctaagagcaattttaaacatctttaacacaaaacatttagcccttattatcctcttaatcttttttctataataaatctataatatgagtagaaattccacaaattagccatgactgaataatcttttctataaacaaatttagtcttaaagaaaatctggtgataataacaccatttttgtatttgtttcatattcacactttctcctgtatcaatcttttttactaaatattgcttcttaagctcatctacttctggtttaaaaaacagataaaatatcacattataatatctaagtattactatttcttctgttatcttttcagctgacttcatacacgtttcccgccttccattgtatatttagttctattttttcatatgtttttaccttatacaccttatacccaccccttaataggtagttaatattcccaccaggatcaatatcacttccactactccgattcccctgtcatcttttaatacctgtaatgcatatcgtattctccacataacatctcttcctttcttatcctttatatctgcatggtcaaaaaagccgggactataacaatgatcaatacctctaccagcatcagaaacattggcaaaagcagcttcgttcctgcttcttcacccagtcttttcgcccgcgccttccgttcttcaaaagcctgtatggattccagctttaaaagttctgataatcccttcgttccttttcttaaattttgtgacaatagtgctccaagccttatataaatctgcagatcacatcgtcttccaaaattttcatagccttcagcttctgttacgccgctgtccatttcatggcaggtctgtctcatttcttcatatacgtatctttcattttcgtcttctttttccttcatgtatccttcggttatctttctccatgctttctttaccgtcattcctgcaccaagatacaatgtcagtttgctgatgacttccggataatcttcgatcatctgcttttttctttcttcttctgcctttcggatattctgtttttgtaatgcatacagaagtatccctatcatcattcccattaccgttataaccggtccgcgttcattaaagggctgataatatctgagttcatttgtgtccagcatctctggcagaattagttttttcttttcttttgttgctgtatctgctttttttattacctcttcaacgtccttttttgtgctttcttctccgcttagttttttcggatatacacatgccacgcactgataagaagcctgctctttttcgtttgccgtataggtaaggactgcattcagttttacaagaactcctttttcagagatattctgctctttaagtttgccctggatatccattacgtcataccggtccagttcccaggagaccttcacaggctcccccgggatatctgtgaccagatccaggtcctcatccacacgatccaatgtctcattaccggccaatatcagcctgtccattttcctgatgatccttgagaataattcctgtacctccttcgcagaatactgtcgctctgatacctctaccgaagtccggacctttttctttttatttccgatctccacatccagttcttccacttttttcccttttccgtagtcatttctctctatggatggtgtcatctgtatccgggaacatgccatatctgctcccgtcactaatatccccaaagcaatgatcaggcctgctgccttcactatacgtcgattctcaggagccttactccaagataataagcgcccacgtagattccgagacatagcgtcatcacccctattcctgttacattcccatacaattcttccatgaaatcagaaaaactaagtgacatataagcaataatcccatacggaaccatcgacatgatctgaaattcatatttctttgcggcaagtagtgtatcaatctctctttttacctctatcttatcgccgatctgactggttgtattacggataatcccgatcatatccccgccacttttcttcgctgttacaaatactgtcacaaagctttttacatcctctgacggaaccctctctgcaaattcttccaggacctgttcaaccggaatatgcattcttaatttccttgtaatgagaagtaattctctggaaatcctcgcttcttcaggatattgtattttaagttctttttgcgtttcataaaatgcattttccaccgaatatcctgtattaagcgccgacgacagtgtctgtatcatctcccggaactgtttttgaaattcctgttccttctttttactttcttcttccaggaattccctgtacagccagattcccggcagtatcaaaaaaatagcggcccacactctgcgataataaagccaggctgtaatgcctatcattccggccgtcttcatccctgcttttgtgcgttctttaaatgtaatatcctgctgccacaagtttttcgcggtgaaaaagttccgcaactttttcccattctccatggactttattttcctgatcctttttttcattttctgttacattttcatcctccttacgaatctcttcataccggtaaatcgtctgcaaatggatctgtccatcccaatatcctaatacctctgttacttccagcaccttcctgcttttatcccgaagccttccaagatgtacaatgatatccagtcctgacgcgatctgacgctcaattgcagggaggggaaggtccattcccatcagtaccatagtttccagacggcttatcatgtccttcggactgttcgcatgccccgtactgagacttccgtcgtgtcctgtattaagtgcctgaagcatatcaattgcttccgccgagcgcacttctcctacgatgatacggtccggcctcatacgaagcgccgatttgatcagatctctgatcgtgacctccccggttccttctacgttcgcgttccttgcctccagtcttacaagattctttatattctgaatctgcaattctgcattgtcttcaattgtgatgatgcgttcattttttggaatgtactgcgataatgcatttaagaatgtggttttcccggatccggttccaccactgatgaatatattgtatccggcggctactaatgaagccagaaatcccgatacttctgaattgattgactgccattccatcagtttattcattgtaattacttcttttgcaaattttcggattgtaacgatcggtccgttcagcgctaccggtggcagcacaacatttacacgagatccgtccgcaagtctggcatccactatcggtgatgcctcatttaccagtctgttagatcctgccacgatctgttggatcacatcttccagcttgtccgccgacaagaatcttttatctgactgggatatcctccctgccttttcaataaaaatattttgtgttccattgatcataatctctgtaatatcatcatcttccagaaattcctgcaacagatccagtttccggaatgcattgaaaagttcttttccaagcattgtcttctgatcaagcggcagatattcttcctgtgagacttcctgaagtacttcatagatcaattctgtcagctcttcatcctccatgtcccttgtcatatctaatctggccaggattcttgcatggagctgctctgcttctatcattctttatcatccttccagttctttttttatcatcttatgtctgacatcatcgtatcccatcagatgtaactcctcttcaaactggaacatctttgcctgcgccacctcctcttttattactgctacatgtatctctgtacacatcctcagaagttcatatacaccccggattccttcatcgatatccaatatcagcacttcatatatgctctggctggcaatctgctctatgaatctcatccattcttctatctttactgccttcagatcttccgacatcctcattggcagaagatagtcaagcggccccatatgctttaccatacccgcaagtgctgctcttaaatgcttcttttcctgtctcgaataatagagtgcatctgcgactgtctgtccaatctcaggaaaatgaccgccgatacctccatacatctcaagattcagatacaatacattatatgttttggccagatctttccccagtctcaatgcatatccggtcttcctgcttcgatgaacaggggaaaatattccgatgatccgaaccttttctttcttcaccgtgccaagaaagaaattccccggttctaccgactcctggcactgttcgatcacatctcttaagatggcctctccggactgatatttattaataagtttctcatgcgtctcatgtgccacgtcttccgattgtgtcagaacaaacacactttctgcccgtactttttgccgctcttcctgtggataaccgctgccgatcagaagaatatcaatcggtgattcctcctgcagtctcagggcctgcgcaacactgttacacacctgcactccaagcgccaattccttggtcttcataaaaaaatgtgcaagcgccgccgcatatctctcttcctggtcgcaaattaccagatttctgcttaccacatactatccctccttcaatacattataaaaatgtctgaaacgtcttgccgatatggcactgaattcattgaatcttttgaatctaacaattagaactacaaatcagatacaagctacttcgtaacttgtaggctgattatatacctgatgatttatatttgtctatggtatttttaaaaatttttaatctttgtgcaatgttcacataatttgatagaaagttataccgtaaagcatggcaaccccaggaaatccaaggattcccgatgtcaaaaatgtgacaggattcattcccacacacgcagaaatcccctgtccgtcaagaaatccgtttacaaaaaatataattgcgaagctgacaattcctcgaaccaggaaatttactgcaatttttgttccccatttcttcataattgttcttatttctttttactttttttaattatatgtccttttatccatactttattccactcttttatatactttggtatctacagaacccgccaccggcagtttcttccgaacgcatggcgatacaaaaaaacaggtccggaattccttttccaaacctgtttttcatatcttataacgaaatcttaatttccctgtccgtgcggtgatacttatgatagtttactcctgccgcatcaaacatcttcatggaagccattaccgcagctgtaccctcgtatttattgcaatcatagataacctctttaatcccgctttgaatgattgctttggcacattcattgcatgggaataaggatacatataatttggctccttcaagactgccgccccggtaattcaggatcgcattcagctcactgtgaaccgtatatacatatttggtctccaaaggatcgtccccttctcttccccatggaaatacatcgtccgagcagcctgtcggcagaccattatatcccattgacagaatcttattatcctgactgactatacaacatccaacctgcgtatttggatctttagaacgcattcccgaaagtttggcaactcccatgaaatattcatcccagcttatataatcctttcttttatctcccatatgtttctcctcgtcactattttgttccgaaaatacggtctcctgcgtcaccaagtcccggaacgatatatttatgttcattcaaatgatcgtccagtgcaccgatatatacatctacatccggatgtgcttcctgcagacgttttacaccttccggtgctgcaatgatacacataaagcgcagatgccttacacctttatctttcagcatctgaagtgctgctatacatgatccaccggttgccagcattggatctacgacaaatacttctctttcatcgcagtcagatggcagtttgcagtaatattccaccggttcgtatgtctgcggatctctgtaaagaccgatatgtccaacctttgcagatgggatcatatttaacattccatctaccattccaaggcctgctcttaagatcggaactacagccagtttcttaccacttaactgcttacctgtcatctcgcagattggtgtttttatcttaacatcttccatcttcagatctcttgttgcttcataacacatcaatgatgcgatctccccaacgatttctctgaattcttttgatcctacttcctcattgcggatgtagttgattttgtgctgaatcagcggatgatccataacctgtactttcgacattgttctcctccttgttgtgcaatgtatcataccaatttttctatatgatgtcctgcagccttcagaagacggttcatgatcgcacttccgattcccgcagtatcaaacgactcactgtagatataatctacctggtcgtcatcaaactctcttaatatccggaacagattcgcagcaatcgtagactcatcggctcttgttccgatacattttacatcaccggatttgtaatcagctacggtttcttctgttccgatcactcctaccttatagcctgcttcggatttttcctttgcgcgcttattaatctcttttactactttttcaagcggtccttctatgatcgtcagatctgcttttggtgcataatgacggtacttcattcccggtgctttcggcacctgtttgctgtccggtctgatcagtgtccggtcaactgtaacctccccgattacttcttcgaacatttcttttgtgatcgctccgggtcttaagatcatcggcggctctactgtcacatccagtatcgttgattccacgccaatctccacagcaccaccgtctacgatcatatccactctgcctgtcagatcctctgccacatgctgtgcagtcgtcgggcttggtcttcccgatgtattggcacttggtgcggcgatataaccgccacccgcatctattacttctcttgcgatctcgtctaccggcattctgacagcaaccgtatcaagacctcccgtcgttccatacggcacaatatcactcttattaaagatcattgtaagcggtcccggccagtatttttctgcaactttaacagctttctccggaacttctgagacaattttatccagtgctttcatattcgtgatatggatgatcaaagggttatcggacggtcttccttttgcggcatatatcttctttgccgcatcttcattcaatgcatcggctcccagaccatatacagtctctgtgggaaatgcaaccagacctccttcttttaagatccgtcctgcttctcttataatatctgtatttttttgatttttatctattttctctattattgttttcatgattttcattatactacactctagttttccacacaagcaatgattcctttcgtaattgcatctgccattttcttctgatacttcgtatcggtcagcttcgcggcctcttccggattacttaagaagccacactcaacgataatcgtcggtacttccgtacgtttgagcagatagtatgtatcatttgcttttgcctgtcttgtattcgtctcatccactgtaagaagggctttttgcatctgctccgccattctctttccttcttccgaatgagaataataaaagacctgtgcaccccgtatctgttcatcctgataactgttctggtgtatacttaccgctgcctgcggcattgttttattgatgatctctactcttgctttcatatcatggatctttttatttccggcctgtggatcgccgagcatctcatctttttctcttgtcattacaacttcccagccttttttctccagtctttttttaatttttctggcgatctcaagattgacatccttttcttttgcctgattcacaccgatctttcccggatcatccccgccgtgcccgctgtcaagaacgattatcttatttttcgctgttacatttccgctggatacaagtttttgcagattcttactgagcagcacaagtaccgccagaaaaagtaacagtactgccagttctattttttttcgcaaataaaaatacctcctgcaattcatatattctactatatgactgcaagaggtattttatctgttatttagttttgattaatttacatatttttgaatcagattccagatatccgtgctttcctgtcccaaagaccactcagcggtacctgcaagcttatacttctgcatgagcttaagtttttgttcgatggatttggcatcttccagccagatctcgtattttgctccgtctgcttcccatgttgcataattctgtccggccttcttgtcccatgtcgtctcaaccccagcctgcttaatctgcgcctgggcattatccataccatatgccacactttctacactgacagaatactctgccgcatctgttcccttttcacttgccagctcttcttctgtcttcggtgtttctttccacagacgtgtaaagaacggaattccactgataacttttttagccggaacttcttttaatgtctcctcaataccttcttttacataattatatgaggataccggtcctgcctcaggggaccccgcataatattcatcatagcccatgatcactacataatctgctacaattccctgctccttacggtcatactgcgtattaaaactcttcggaacataattgtccaccgataataccagaccattctgtctgcacttcaccgataattcacgaatgaattctatataatgttctccgcatttatcagatatcttctcgaaatctacattaataccgtctaccccaacacgcagcgcttcagcgatcagctgtgtgatcagcgtttcacgtcttgatgtataactaagcaattcgtaagattcctgttctgaactgattcctccgtcaaagtctctgacggtcatccacacttcgatattctgctgatgtgcataacttacataatcagatgatgcaatagatgtaatattgccgctggtatctgccacatgcacccatgtcggtgccagtgtcgtaagacctttggtctgtgcgatcttctgtgccactccattattagcatcctgatttgttacattatgccatgccatattaatggtgtaatcctttgaaatgcttgaatagttctgctcatcgaattttcttgtaatgttcttcttctcttcattcttcagagcattgttcttaacatatccgatcacaccttcttttgtgcggatcttcttccagttttcttcactttcgatgattgttacttcatcttttttcttgagttctgccagtacagggctctttactccaccctgataacgcacctgtgtattcttctttacagttgccacatccgttttgccccatttggttctgatcattacatgatccggattacttgacatttcataatcaatattggtgtactgctggacaaaatccaacgcgatatatgctgtgtttccttctgtttttaaaatgacgtaatcttcgctctttttctctctggataccgaataatccttgctgcccacatctaccgatatcatatccttcggaagcatatacaacagtacattctcattcgaatcccagtaaaaacggctgttaatgtaatctcttacgacatcatacgcaacataagcctttccgtccgacaatttacccttggcctctacgaccttgttatctacagtgattccaagctgtccgtctttttcaattccataatatttcttcatatcatattgctcttttgacgggctgtatcgtttccatataacaatccctgctattgctgcaattactaatattattaacaggacaagctggatcatgcggtttctctgtcgtcttcttctcatgcgcgctctgtccgcagaacttctcctacctgtcggtcttcttccaggcgtctgtccggatgtccttctgtttctgctctgcgaagccggtcttccggatggtcttgcacttgttttttttctgttattatatgtgcggctatttcttcctctgtcttccatgctgcacctcctacagaagacattatagcaaaacgttagatacacgtcattatatttcgacattttcatcaaaactttcgttctgatctgcggggtatttacatattttcttccattaaattgttatattctggaaccacacttctttcacatcgcctttgtcattcagcacataatccctcatataggactggtgttcacacattgtatgcgcctgtacgatctgcataggactggccggtaccccattgatcctgaggcttatatttttcttttcaaaaccagtcagttcctgaaacatctctttcatctcttctttctcccccatactgcttcctcctctttaccggatgataaccgtggttgtcacgcatattttacggtcagggagatgcttgtgatacaatactgtccttctatgcagcaactgataaatataactggaaaacagttccggcaattatgtaattgtaaaaataaattgttaacgtgaaatatctgcctgaaacggctgtaattaatctgatttgtcattgatagattcattccacccggaatgtggaattgaaataaaattcaggaaattcttttcctgatgttctaataacacagttatcagggaaaactatcttccagtagggccattatatccgattcattttgaagaatcaagtcttttttatttttatattccactttgtttatattaaatttattgaacatccaacattttgtatgatatactattttagaaggaagtgatgattatgaagattgaaaaaatcagtgacaaccagatccgttgtactctgacacgtgccgatcttgctgaccgtcagttacagctcagtgaactggcatacggaaccgagaaagccaaatcacttttccgcgatatgatgcaacaggcagccttcgaatttggttttgaagcagaagatattcctcttatgatcgaggctatcccttctgcagattcgatcgtgctgataattacgaaagtcgaggacccagaagaactcgatactagattttcaaaatttgcaccttcttccatagctgacgccaagaagaagaatactccaggcaagctggaaggagcagaaggtttacttgatctgctcggaaaggttcaggaatcttttgaagcacaggcagcacagactgcaaaagcagcttctgagacttcagatgataatacagataagaaggattccggtaacaatatccggctcttttctttccctgtaatggagaatgtactgaaggccgctcatctgctggctccaatgtaccacggttccaatacattatacaaagatgatcaggaagagatgtatctgctggcacttgcacagtcagaccattccaccgcagattttaaccgtatctgtaatatgttatccgaatacggtgcattagaaagtgcatccggtgcaacatttgcatttttagaagagcactgtgagacattcctttccgggaatgcggttcagcagcttgcgaatatttaatctgcatactctggtatactaaaaaagctctacgggataattccccgtagagcttttttatactcattttatattatgcctggcttgcttccagtgttgcatttaactttgcaactaaaaggtctggatcgattccatgtcccatagcgccttcttcgatagattccatctgagaatgtgggcatccgatgcaacccattcctgcttccatcagatcgtcaacaagctttggacatgtagaatagtatttggaaagcagctcaccaaatgtcatgtcttttgtaatctgtgccatcttatcgcctcctttttatttcagtgtttccattatagtagctttttaccattgtgtaaacattttctgtaaatttattcttaatatttgactacttaaaagtcaatacgaattcctttttttttcgacaaaacgtcatttttataacaagtctacaaaacgttcgttctttttctatccccgagtaatcccccgtttttcccactttgggtgtggataacgtggataactttgtggaaatccccatttttctacatttttcctgtttttttgtgtggataactttttccaccatattttttaagattttttacgttcgatgaaaagtgtcgatttttgtggattttgtacattgtggataactctaaatttatgtggatagtgtggataacaaaaaagggacgaaagattcgcaaaaatattttaaaatctcccgtccgtttctgttataccagtcgtctcaccgtaacaatattcgtatatgttgccggcaaaattcctatcccttttgcactgttaattgcatttacgatctgcccatttcccatataaattccaacatgtccgtcatatagaataatgtctcccgcaacagcctgatcgtaacttaccgcagttcctacattctccatatcccacgtcgtacgcggaagagaaattccaaagtgtgcaaataccgactgtacgaatcccgaacaatccgctccgtttgtcaggcttgtacctccccatacatacggattaccgataaactggcatgcataatctacaatagcctgtccggtctgtgccgcctgcgtctgttgttcttcctgttgtttggccgcttcttctgctgcctttttctcctcctcggctttttgttctgcctctttttgaagccttgcggcctcttcttcttttgattctgcatacgtaaatgcttccttagcattttccgtatccttcttctgcacaagttcttctgcttttttctgtgcttcatttcctactgttatatactcggaatatacatatccggtgacattacccgactgcactttcgtccattctcctaccgggcctatgatttttgccgcgtaatccggatataattttccgacccattcgctttctgtcgtcggttcacttcttatataaagaaatgactgtacattggcgaatgccatatctaaatactctcccttttgtgtcggtacaaggtaatcctttaccgaaattgtcttctctgacgtgtaacattctccaagtacctgctcaattcctgctgtcggcatatcctgcgtatcatctatatctgcagcctgcgccataatcggaaacgccgttatggctcctgtcacagtaaccaggaacaatccttttttaagaatagaatccataaactccctcctttatgttttcttatcttttgtaattgttacagaattgttacatatgttacgtttgttattataacattacaacacgttttgtcaaggttttctttgattataatacatttaatattcgatttatatttattatttgttacattttgttacattcattcttttatattgacaaaatatatcatccgaattatactaaagatatatcaattatagtaattattattattattgaagggaggatttatggccggtttaaaatatagtaagcaaagggcctctataaaagattacctgatgcacacgacttctcatccgactgctgataccgtatatcttcatattaaagaagaatttcctaatatcagcctcggaaccgtataccgcaacctgaacctgcttgcagatatcggagaagcgcttcggattccgacaccggatggcggcgatcgttttgatggacgctgcgaacctcattatcatgtagtatgcaccaattgcggaaatgtattcgatctggaaatggatgattcctatatccagaagattaatgaagatgcgaataaatgtttcgatggaatcatcgaatcacacactacacttttccacggtctctgtggcgaatgtgccaaaaaattaaacgagaataaataataaaatttatcaaaaactaattgacaaacacataagattatgctaaattaatatcagtaacaattactaatattaatttagtgcaacttaagagattataactactctcttatcaatcaataacaaaaaaattattataaaagaaaaggagaacaacactatgaaaaaatttgtatgtacagtatgcggatatgtttatgaaggagaagctgcaccggagaaatgtccagtatgtggcgtaggcgctgacaagttcaaagagcagacaggtgaaagagaatgggctgctgagcacgttgtaggtgtggcaaaaggtgtaagcgaagacatcttagctgacttaagagctaacttcgaaggagaatgttcagaggttggaatgtatcttgcaatggcaagagttgctcacagagaaggatatcctgaagttggattatactatgaaaaagctgcatgggaagaagctgagcacgctgctaaattcgcagaacttcttggcgaagttgttacagacagcacaaagaagaaccttgagatgcgtgtagacgctgagaacggcgctacagctggtaagttcgaccttgcaaaacgtgcaaaagctgctaacctggatgcaatccatgacacagttcatgagatggcaagagatgaggcacgtcacggaagagcattcgaaggacttcttaagagatattttggataggaacgatctgatataacaagaatttttattccgatatcttccggatgaaataatgattcagaatcgcaaaaggcagatacaccacttaaggtatatctgcctttttatatcaccatagttcataagtatctgccaatttccaaaggaaaaagtctgtgatatccccttctatgccatgcgcacatagatctttttcaccggctgatacagaatcgcaattgcgatcaccataaatactgcattgatcacagtcgccggaagtgatgtgaatgctgccactgcagctgctgcaaatccacttcctaccatcatcattgcgatcgtgctcatagtaaattccatgattacgttgatacatccatagataaatgcgcagacaactgctgctccgtattctttcttcttgtctccgtctgctttcttcttaagcatcatgaaaagtgctccgacgatcagacattttactgctgtctccacaaatgtcttcggcgcatcctgcatgtaaccattcagcatatcaaagattgtaagtccaagtgtccctgatacagctcctctcttgccaccctgaagtaacagtcccattacgacaaatatatgtccaaaatggagaaatggtgttccgactgctgccggaagtggaatcctaaacgactgaattccaagaaatgtaattgcggtaaagaatgccgtgatcacaaggttctttactttattatcattcattgtcctgcctgctgttatatttgtactcattgtactctcccttcctgcacacttccatcgtgtgtataacagatgaatctctcatctgccataatttaataccgcataatatattatcacgaaagtggatgtgtccatacagccagttgttctattttcgcacaggccagtttatataatactttgattttaaaaatatttttgtttttctacttgatttttttcagtttcgggtataatatacacatatagcaaacatagtattaaaaactacatgtcatattttcgacattcaggaggtgcatgattatggcagagcagttaaaagaacacattaaagatccgggaagcgcgatcacacattttatcggaatgttgatggcaatcttcgcagcaattccattgcttttaaaagcggcgcgcgaaccgagtaaaatttacattatcgcaattgctgtatatgcggcaagcctgatcttactgtatgccgcaagcacaacttaccatacattcgataaatccagaaaagtaaatacaatccttaaaaaaatcgaccacatgatgatcagcgtactcattgccggaagttacactccgatctgtctgctggtacttggcggcaaaaccggactcatccttctggcaatcgtatgggcatttgccattgccggaatcctgatcaaagcattctgggtattctgtccgaaatgggtttcttccgtgctctatatcggcatgggctggacctgtgtcctggcatttacacagttactgaattccttaagcccggcagctttcggatggctgctggccggtggtatcatctacaccgttggcggcgtgatctatgctttgaagcttccaatctttaacaataagcacaaatatttcggaagccatgagatctttcatctgtttgtaatggccggaagtgcctgccacttcgtagtgatgtatgcatttgtactttaagtaatatccatttatccttatatttccggtatacagagaacttgctgccggcaacatctcttgcatactttagcagcttctttcgaacacatggcgataaaaaagagcccgcatcacacacgggatattaaataatatctctcccgacttgatgcgagctcttttttcatttattctgccagttcttttgcttcccgtgtaagtttcttaatcttctcaaattcaccggctttaatcatatctccctttaccatccagcttccgcataagtttccattacccttgatcaatatctctttttctttcctggtcaaatgcttgatcgcatattcccggctcattgcctcattttttgtctcatgctcttcataatacacaagcttcaccggtcttctggtctttgtatacttagcgccttttccactgttatgtgcttttatccgcttatccagatcatttgtccaccctgtgtataacgtgctgtccgcacactttacgatgtatgtataattcatgtagttgtccccacttatccacaatcggtccgatttttcctgtaataatccactttattttatccattatcccacggaaagtcaattttatcccctgttcatagatttttccgcatactttgatatcggcagaacgctaaaaaagaccggaaaatttcttaagaatctccggtccctttctgttaatcctgatccgccgtatactccaccggattcaccggctgtccgtcttttcgcatctcaaaatacacattacagccttctttgctgtaatactttgtcggctgactcacataaccaagcacactctttgcttccacataatccccaactttcaccgggacttctttcaactgtccatataacagctcatatccatttccgatatctacgttaaccgttgttccggtctgtgcactgacatcgatcgacttgacgattccgggcgcaccgcagagtacctggtcgccttctgcgccttcgatgatcacagccggattatacttgtactgatccagcgtctggaaatatactgtcttatccatgctgtagctcatgatcacagctccgttcaccggccacaggatgtaactgtcttccgtaaagttgatattgtgactttttcctgccgttgcctgggttccggtatgacctgatgatccggatgttccggttccttcggatcctgaagttccggttgtcccggaatctgttgtcccggaatctgttgtcccagagcccgttgttgttccgtctttcccggttccgttactgtcactttcatccgtatcacttgtcatatcttcgtttttaatcttggatgttccggtttcttttgccgcttcgctgtcttgtttcgccttttcttccgccttcgccaattcatttttctgcgtttttctgtaatcattaaatgtatatgttcctgctattgcaatcgctgccacaaaacataatactgctgctacggtagcacgccgttttgacattgacggtttctgatttttattcatttcatcaccacctctgaccatatttttgccagattgtgatatagttatacaccttttacgatttctgtcacttcttttatctccgttccattaaaaaaatattttaaaatatttttatagctttttttcttctttgccatctcatttgccgtatactggctcattccgatcccatgtccggttcctcttgttgtcacccgcaatttgccgttataacgctgcagggtaaaacagctggatgccaggttatatttatttcggaattcttccccgctgatggtattatctcccacacggatctttaatacatatcctacagaatctgtttccactacctccacatccatcgtccctatatctttttctcccaatacaaccgtctgtatctcatcttctgcattcacatcctccgggcattccacaatcttcagataaggatactcttcctttccaagaacctctttcgcatccctggtatatccattactcagattaaaaaatggtgtcatcgccagaccgtcttcatagaatagcacttgtcctgccgtggattccagcgcattttttaacttgcggtaattttctgcatatcgcatcccccacgccgacttcatctgtttctcggtccagaattctttctcaagcttctgtccttcccccgcatcccggattgcccggtagacttctgtccgcaccaggattgcctgggccttcaatgcttcttcttcatattctgccggcatgtccctcgccaatattccaatgcaatatttttccaccggcatcttcccaccgccctttacatctattgtcatctcatctactttcgatgcagttacaatctttggaccatttacaaatacggttacaatatacggtaataatattatgataagcgcccagcaggctgccttttttattttttctctataataataccttctgttccacataaaaaaagccctcccatacctcaatgtatgagagagcttctcttattattcatatacaaaagaacttgccactgacaacttctcttaatattctaattcatcctcatcgatcacaacatgatccagatgccagatatcatctacatattcctggattgttctgtcggcagagaatttaccacaacaagcagtgttcttaagagccatcttagcccatttttctttatctttgtaagcttccattgcacgagcctgagcatctgcataagaacggaagtcctttaagataaagtacatatctgctcttgaccccccctgattattcagaaggctgttgtaaaggtcacgatacatctctgtatcgccgttagaatatgttccgtctaccatctggtctaccactctgtggatatccggatcattgttgtaaatgtcatatggattatatccgccgttctgctcgtagttgataacttcgtcggcactcagtccgaagataaatgcattgtcgattccaacttcgtctacgatctctacgtttgctccgtccattgttccgagagtcggtgcaccgttcatcatgaacttcatgttacctgttccggaagcttctttggaagctgtagaaatctgctcactgatgtctgctgccgcgaagataagctctgcgttggatacgcggtaatcttcgatgaagacaactttcagtttgccgttgatgctgcggtcattgttgatcacatccgcaacagagttgatcagtttgataatctctttagcacggatatatcctgcagaagcctttgctccgaagatatatgtcttaggatagaaggacatttccggatgttctttgatctggttgtacagatacattacatgcaggatgttcagtaactgacgtttgtactcgtgcagacgttttacctgtacgtcgaagatcgatcttggatctacttctacaccgttgtgctctttgatgtaagctgcaagacgttctttgttcttgaacttgatcgtcatgaattctttcagagcctcttcgtcatccagccattccttcaatccgctcatcttggacaagtctgtaatccactcttttgtgccgagcttttctgttacccagtcagcaagcagcgggttcgcatgcatgaggaaacgtctctgtgtgataccatttgtcttgttgttgaacttctccggcatcatctgatagaagtctttcagttcctgattcttcagaatctctgtatgcagctttgcaacaccattgacagaataacctgcaacgattgcaaggtgtgccatcttcacctggccgtccatcaggattgccatcttcttaaccttttcttcattaccaggatactgtgctcttacctgcgcgatgaaacggcggtcgatttcctggatgatctggtaaatacgcggaagcagtcttgagaacaggtcgatcggccatttctcaagtgcttctgccatgatcgtatggttcgtatatgcacagcattttgttgtgatatcccatgcttcattccatccgagattctcctcatcaagaagaatacgcatcagctctgctactgctactgtcggatgtgtatcattcatctggaatgttactttctccggcagtttgctgatatcaccatgtttctttttaaactttgtaattgcagcctggatacttgctgatacgaagaaatactgctgtttcagtctcagttcttttcctgcgatgtggttatcatttggataaagcacttctacgatattcttcgcaaggttctcctgctcaacggctttgtgataatctccacggtcaaaagaatctaactggaagtctacgatcgcttctgcatcccagatacgaagtgtattcacgatatggttgccgtatcctacgatcggataatcataagggatcgccattacagattcatagttctcctgaacgaagtgtgtctttcctgtctcatcgtattccacacggatatttccgccaaaacgtacttctttcgcatattccggtctgcgaagctcgaacgggttgccgtcttttaaccagttatccggtgcttctacctgatagccgtctctgatcttctgcttgaacataccataacggtaacggataccgcatccataagatgcatatcccagtgttgcaagagaatccaggaaacatgctgccagacgtccgagtccaccgttaccaagtgccggatccggctcctgatcctcgatcacgttcaggtcgattcccatctcttccagagcttcttttacttccttatatgccgtcatgttgatcaggttgtttccgagagctcttccgagcaggaattccatggacatgtaatatacggtcttcggatcgtctttctcatactgtttctgtgttgcaagccagtcatcgatgatggcttcctttacagcataagaaactgcctggaacaactgctgcggagttgcctcttctacttccttacggaacaatgtcttcacattgttccgcacatctcttttaaatacgtctttttcaaatcttggattatacattttctacttcccttcttaaaaactgggctttgattatctcttctctacaccaatcgttacggcttcaccattgatcttccactcttttgtgtagccggcaggtgctgcctttgtaacttccagtgccagtgtctcatctgcgatcgtagatgcattgtctgcaaatactttctctgctttctctgttccttcgtaagttaccgcaatcttatccataacttcgaatccggcttccttacgcatggtctgtactttactgatgatctcacgaacaaatccttcttccagaagttcttcggaaaggtttgtatccataacaactgtgattccgttgtcattctcagatacatatcccggcatctgagcggattcgatcagcaggtcctcacggaacagtgtcacttcctgtccattgatatcaagcttcagggcatctgtagcatttaactcatccattgctgcatttccttcgaggttttcgagtgctgctttaatacctcctaacattttaccatattttggtccgactgtctttaactgaggtttaaaagtatatgaagtaaagtcacgaacatcttgtgtaaatgttacattctttacatttaattcatcttttacaatgtctttgtaaaattccggaatttcgaaatcagcttttacatacatctgtccgattggctgacggttcttgatgttggctgtatttctgcatgcacgtcccataacaaccagtttcagaacgttgtccatgttagcttccagctctgtatcgatatgtgcttcatttacaacagggaagtcacacaggtggatactttccggtgcgctttcatcaacgcttcttaccagattctggtagatctcttctgtcatgaacgggatcatcggagctgctgtcttgcagatctcaaccagtgctgtgtacagagtcatgtaagcattaatcttatcctgctccattcccttagcccagaaacgttcacggcttcgtcttacataccagttactcatgtcgtctacgaagctctgaagtgcctttgcagcctctggaatcttgtagttggacagatcatagtctactgccttgattgctgaattcagcttagacagaagccatttatccataacagacagtttgtcgtagtctaatgtatattttgttgcatcgaaatcatcgatatttgcatacagtacgaagaacgcatatgtgttccacaatgttcccatgaactttctctgaccttctacaacggcttttccgtggaaacggttcggcagccacggtgcactgttgacatagaagtaccagcggatcgcatctgcgccgtatttctccagtgcgtcgaatggatcaactgcatttcctttggacttactcatcttctgaccgttctcatcctgcacgtgtccaagtacgataacgttcttgtatggcgctttgttgaagatcagtgttgagattgcaagcagtgagtagaaccatccacgggtctggtcaacagcctcggaaatgaagtctgcagggaactgcttttcaaataattctttattctcaaatggatagtggtgctgtgcaaatggcatagatccactgtcgaaccagcagtcgataacttccggtactctgtgcatctgtttgccgcagcatgggcacttgatcgttacatcgtcgatgtatggacggtgaagttcgatatcatccgggcagttgtcagacatttctttcagctcttcgatgcttccgatcgaatgctggtgtccgcactcacattcccagatattcagtggagttccccagtaacggttacggctgataccccagtcctgaacattctcaatccagtcgccgaaacgtcctttaccgatactttccggaatccagttgattgtgttgttgttagcgatcaggtcatcttttacttctgtcatcttgatgaaccatgattcacgagcgtagtagataagtggtgtatcacatctccagcagtgtggatagctgtgctcgaacttcggtgcatcgtagagaagtccacgtccgtcgaggtcttttaatacttccgggtcagccttcttaacgaataatccggcaaatggagtcgtctctcccatgttacctttttcgtctactaactgtacgaatggcatgtcatacttacgtccaaccttggcatcgtcttcaccaaatgcaggcgcgatatgaacaacaccggtaccatctgtcagtgttacataagtatcacatgtaacgaagaatgctttcttgttctgcttagaagcgcagtcataagcacactggtataatggctcatattctttgtattcgagatctttacctttgtatgtctcaagaatctcgtatgctttctgtccttcttctgcaagttttccaagtactgtatcaagaagagctactgccatgtagtaagtatatccgtcagcagcttttactttcgcatagtcttcttccgggtttacgcagagtgcgatgttggatggaagtgtccatggtgtagttgtccatgcgaggaagtatgcatcctctcctactactttgaaacgaacaattgcagaacgttcttttacatctttatacccttgcgctacttcctgtgcggaaagcggagttccacaacgagggcagtaaggcacgatcttgaatcctttgtaaaggagcttcttgtcccagattctcttgagtgcccaccactcagactcgatgaagttgttatcgtatgttacatatgggtcatccatgtcagcccagaagcctacggtattagagaaatcctcccacatacctttgtatttccatacgctttctttacatttcttgataaatggttcgataccgtatttttcgatctggtcttttccgtccagtccgagaagcttctcaacttcgagctctacaggaagtccgtgtgtatcccatccggcctttcttggaacttcgtatcctttcattgtgcggtatcttggaatcatatccttgataacacgtgtcagaacgtgtccgatgtgcggttttccgttggctgtcggagggccgtcgtagaacatatagatctcgttgccttcacggtcacgcatactttttctgaagatgtcattgtcttcccagaatttctctgtctgtttttctctgtctacaaaattaagatccgtagaaactttcttatacatatttacctccataaaattaaaacatagaattaaaaaagcttccgccctgtataggacgaaagctgtacttacgtttataaaccacctaacataccatcatatgtcttccctgtaacggaggaatgccgtcagtttttacttggcagtcaggcttttgttcacaccctgaaaccgttcaaaatctgcaactcagaagtgatattcagatatatcttacttgtaccggacttccaccatccccggctcgctgctgcgttctgttatatcctactgtcttcgtcagcgtttttcacattccttattatatgcagtaatcctaaaatccgtcaagggtttttaccttttttaatcggtttttctccgtatttttcatatattttctattttttatcttctacggcgtataagcagcacgatcagactgaagatcagaatcaccagtgctacgcatcctccggcgatcatatatttttctgtacttgattttccggcaaattttttctgtccgaaatcccatactgcttttactttttgcagaaaattcttccagatactcttttcacttgattttccaccgtttttcttcgaatcaccggaattatccacatccttcggcttactgtccacacgttctttcctggtgcttactttctgtaaatatttatccgtaaattttgccgttgcacttccaacctgatggccgtcatatatataccggatcgttccctctccggtatcttcatctacatccgtaatttcataatctatatctttgtatgatacatccttcggcaggatcacatatccgtcctccagcggctgatattcatttccgcctgtctgcacggattctgtatcctcacttccatctgactgtgccgatacagcactctggctatccgcagccgatataaatttctctacttcatccggtttcttctcatctgccacctggatcttctggaaattgttaaatgcatattcgaacagattcttcgtatccggatatatattcacaccatgtgtccgaagtacgacacataccagtttcatattgccattatcggccaacgtgatcagcgtagataatgcattcgatgtatatcctgtctttcctgcaaccgcatactggtaataatttttattttctttgatcagcatcttatgatgctgtggaaatacatgttcttccgtcgtatcggatgccgggatcttataactctgctcctggcagatcttcaggaattccggatagcgccagatctctctgccgatcaaagccatatcgcgcgcacatgtataatgattgtcatcatgaagcccgttcgcattgacgaaattggaattattgccgccaagacttttacattcttcgttcatctgctggatgaaccagtcgtaatcatgtccggcatttttcccgacattttccgccaccgcataagctgcttcattcgctgaggcaagcagcgtcgcatataatgcctgttccagcgagatcacattaccttcttttaatccaaccgaagaatctcccggctgcataaaagatatgcagtcattggaaaatgttaccttgtctgacagattgccgtattttaaagcaataagactggtcaggacttttgtgatacttgccgggtactcatgttcatcaatatttttcgcatataagatgcttcctgttcccgcatccatcacgattgcagcttcaccgtatgtgcccggtccttttggccagttcttccaaccgttcgactggatctccatcttataggcatcttcttctgccttcttttcccgctcttccggcgtcatgtcttcttcttttttctcttccttcttattggaatcatcttttgatgcgtctgccgcctgattgctctcgctgccgccaggttccgcatatactttctgacttaccgttcccggtattactgtaaataaggccaagatcaatattataatcctggccacaactttcttgctctgtttcattatactcgcccgtttactgtccccttatattcatcttttgtaaatccctttaatataacaactgctcgatcttctttttattcgcatcaaaatcaaccttcagtacctgcataccctcataagtgatatctgtatacgttccgtcctgtggaatgcatgtctgctgcatcttcagatcgtctaccgacagaacatcttttgccatagagtacatctccgatacactcatattcgtctttacatgatttacagcgtaattgatcagaggcagtaatgcgcttggatccttcttctccataatcttacggtagattccatacattacacttctctgacgtcttgttctttcaaaatcattgcccagtgtacggtttctcgcatgcgcaagtgcctgggatccggtcagtgtcacatctccggcctgaatatccggcataccattctctctgtaataagcagcctcttcttcactgatgaatacggtcacaccgccaatctcatcgattacatttaccagatcatcaaagctgatcgtaatataattctgaatatcaagatcatatgtcttattgatcgtgttgatcgtaagtcccactccgccgtatgcataagtatggcccagacggctctttccatgtccgtcaatatcaaccagcgagtctctcaggaatgagattgctgttgattttccttcttttttgttaaaggataccatcatcatactatcagaacgtccccggtccgcatccggatctctggaatccgtacctaccagaaggacattatatacatccttgtcttttctcttttctttggcgatcttaaccttctttgcattcggatctactttgtctgccgacacaacccctacagagtccccgtagaatttccaccagatcgacccgtagataccgccaatcagcaatacgatcaataatattataattcctgcaatcttacgttttttgtgttttcgaaaaaacttcatctgtcggtgtccccctagtccttgatcacacggccaaacttgtccgtcgaacctttttccatcttgccatagtgaccgtaagctccgtatttaccataacttccgtagtggcttccataactgccgtaattgccgtaacgtctgtatccatagccgtatccttgtccgccggatgaattatcaccattgaacacatatcccagcatatcgattccacttaatgcaaggctttctacgccttctctgatctcgcgaagcttcgtataatcatagcggatcacataaagggccgcatctacatatttgcccaaaagcggtgcatctgccagaagttcggatggcgcagtatccaggatgataatgtcatattttgacttcagatctttgatcagtgctctcatacgtccgcttcctatcaacagcgaattctctctatccggtgcgccgccgaaaatgacatgaaggcttccgttctcattcgttctttccttcggaagctttacattggtaattgcttcagataacggcacttctttcttaagaaccgagccaagtcccggatgtggttcctgctcgttcatcactcctgcaatcgaaggatttctaagatcacagtcgaccagcagtactttctttccctgctgtgcaatggaaattgccagattcgccgaaagtgtcgtcttaccttctcccgggatcgaactcgtaacaagcagggtctggtattcctttttctccacatctttcataatacggatacgaagctttcttatcgcttccagataactcatagagattctttcatttaacaggctcactgaattataaaatgtctcttttttacgctttttcgtgcggacatacgggatacttcccagatcctgcagattgatattcttcttcagatcctttcttgacttcacagtccttctggaaagcacatacagcagaagaatcacacaacctatgatcgcaccttttaaagctccacgcttgtaagatccacgtataacctccacacgtttggtatctgtcgggataccggtctcatccagaatcgtaagcttggtctctccaagtacgaattccgcaactttcggataattctttatgactgattttaacgtcttatatgccatctgcggatcatttcccgatacggatattgtcagaagattcgttccgtcatccgctttaacatcgatcgatcccggcatagaatcaagccccatgtcctcagcaactacatccttcagtacaccactggtaagaatatacgggaacacttccgccatctgctgggcagactgtgcattcacatagtccatgccgccgacagatgtcaccgacactgttgccgatgccacatattttgactgataactggtactcaccgagaaataagactgtactgcgcaaataattataagcccgatgaacagccaccacagcctcttcacaccatgataaacatccaacataatattcgtcagatcaatcttctcaggcgcatctacacgttcacttcctgatttgtctctataatcgcccatatactctacattcctttacttcttccataattgccgtaacgtccgtatttgctatatttaccataataatgtcccaccggactgtccaccaggccggagaacgatcttacaccgttcagtacaactcccagtaccttaccttccttgtcacggaaagcgtccattacttcattgatgtcttcagccagcatataattctgctttgccacgatcataaccgcatctgcacaatgtgcaaatatctgcgcatctccgatgattcctgccggtggtgtatcaatgatcacataatccacaaatttcctgcatgccgtcatcagcttataaaacgaatccgagttaagcatctctgtcgatgaggaatagcagttctttccacccatgaacaacatatgctttctggtacacggaaccatgacatccgcaagagatccgtttcctctcagatactctcccagttcattctcctcttttggctccataccaaagatcaggaactgcgacggtcttcggatatcaccatctaccagcagtaccctcttggactgttctgccagcgtgatcgccagattggcggcaaccgtagattttccttcattttcagatacactggttaccacgagaactttctgttcattctttgccatccggtattctaccttggccgccagtttcttataactttccacgaaccggaagctggctaccggatcatcaaccaggatcgcttttttcttacgccggaatatatcccggatcgtcttatatttccattcataactgatggctccgagacttctggcatctagcttcttctcgatctcattctcctgtttaatagtattcttcatataagaaaacagtccgaggaggatgagcaccagtgctcctgccacaagtccgcccttcttagcctgtccgcctgcatccagcggattatccggtgtatacggaatcttcggctcctccagcacatccataaccgcactgcccacggtatacagcgatacgctgctgtagttgtccatgaccgtacggataatgtctatggactccttcggtgtatccgccgtcacacttaagaccagcatattcgtcccttccagcaccttcgcatggatatctgcatccagctcctctactttcagcttctcacagatctttttctccatgatgttactttttaatatcttctcgaatgtcttcgccattgtgttggccgaactcagattactgtatgcattcgcatcccctctggatgacactacgaatgtcgcctgcgttgtatactcaggaacatatctgctgcttacaactacataagttaacaacgctcccgcaattgcccccaggatgatcacccaccagttggacactatatcatgcacaagagtatacggatccaggtcagtatccataaatgccggcatgtcatttctattattactttccatcctgtgttacctcctgatcctgtaccacaacgaataactttgtcaccgcagtcggtgctccctctgccgtataagaatattccaccggataaacccctgctttggaataatccacttctgatttcacactgatcgcttctcttgtacctgcaagagcttctccgtcatccgtatacgtatatgttgcaccattcatctccatacctttgacataagacatcggatcgatttcatgtcctactgtcgtatacgcgatataatccgataatgccggatattctttcatctgctcctgtctgtcaccggattctgttacggtcacttcgagaggcacagaacacacatcacccgcactgttgcttacctgtacggtcactttgtaaattcctgcagctgcattatacataccatcatccagactggtacgtatctgactggtcaggtcaccgtcaaggcaatcctctgccttcatattctccgtaaggttcgccttccccacctctgttgtcgaatatctaagcggttccttcagatggatcttcggcggcgtgtaatctttgtactgtatggttctttccagtgtccctacctgattcgccttatcgaataccacatacgtaatggtacgcttgcccggcgcaataaaatgcgacatcgaagcgatacgtacagacgatgtcaggtcaccgtcacggttgtcttctgctttgacacctttcagaagtgctttcttctgcttcttctgatcggtctgcacactcagtgtcaccgtcttatccttgcatgtgatcaccggcggtgtatggtcttccaacatcttggacttcacagtatatccggcaaatatgacacaggatgccacaaatatcaggcatactgctatttttagtctcctcataattcttctcctttattgttaatatagctgttgccgtccggaatacgggaccggttctaatctcaggatttcccggttgtcacagatccttgccggattatactgaaacagcacatccagatggttctcggaatactcccggctcagttcttcatacacatccatcatatacggcgtcctctgaagcgggctgtgtgcatcacttgcgatcacagaaatcagattatgccgcaaaagactgtcggccgcacgcttcggtcctcctccgaatcttccgaggaagcttcccttattcgcctgaatcacatatccttttctgaaccagcggtacgcgatctgcggataatcctgtataaattcatacctttccgcatgggcgatcaccggtcttgctccgacttcttcaactctcttcagaatagaatccgcaaattcaggatcttcatcaaatgcaaattccatcaatatgtaccggctctggttaagcggcatgatcttatgattcacgatcagctccggaaggtcttctgtcgaaaatacttccattcccggcaggatctctatcgggatcttctcttttctgaccgctctgaccacactttcatatctgtcaatatattctctcccgaaataattcccatacattcccgggatattgcaatgcgaggtcgctatgatcttgtccactccactgtctgctgccatacgtgccatctccagcgtatcatacatatcttcggctccgtcatcaatccccgggagtatatgcgcatgtatatctatcatctcatcatcctttgtaatttatagtcttttttattatatcattttcaaattatggagtaaagaaaacgatacttactatttcattactatttcttacttgtctccttcagatatctgaccgttgcttctgtgtatctgcacaaatattccggtacgccgtctgcttttccggtctccgcaattgccgctgccacacaagtgttacatacctttctaagcttacaactactgcatctggccgaaattctaagactctctgtcccttttttcgtaagctcccacgcttcctcaaactccacatcccgaagcggtatgcttggcttatccagtaccacacaggatcgcatctcgccctgccagttcaccacaaaagaactcttaccggcacgacatgccatctgtcccggaactgcctctccttccggagtattctctgcttcgtctaattggatcttgcggtattgggcaaatacttcttctcccatctctttttgcaaaacttccactcttgcttttgccgccatctccggatccagtctggcctgattattataggcatgatttcgttctctcacggacggatacatataagtatcgatcctcaccggagcatccagtgattcaccaagctctatgatcttcatcctgtcatccacattcgcctttgcaagacttccattcactttcacatcaatgttcctctcccgcaaaagccggattccattcaccgctttatcaaatcctcccggatagtggcacagtcgttcatacgtctcattacttgcaccatatagcgtgatattaattcttctgggtttattctccgcaaaaaaatcggcccactcctcgtcaatcagtgttccgttggtattaatcgtaacgatcatacccagttcacggagtttttgatataactcgcggaaatttggatacaacagtggttctccaccggtcagaaggacaaataacgtcccggctttcatcatatcttctgcaactttggtccattcttcaattgtacacagccttcccacctgctccatctcttctctgctcatgcgcacataacacatatcacagttcagattacagagcggtaatagctccagcactccatacaatggtacttttttttctgcggccattgcgaacatctggcgctccattgtggtcccatcttccattaattccattccggttcctcgatacttcctgtagattttaaaaaagaaccggaaatccggttctttttcgatatgtatatatgtttgttttatgattttgtagtttcccaggactctcttttaagattagttgtacaatgcacatttgttccaccctcaatccagatgaaaacaggaatattttcatccggtattgtgtaaacgtcatctatatatccttcaataaaatcaccattcgtaggtgcttcatgagttgcattacacggaccatactttcctggtaatacttctccgctttttgtccttactttgtaatgataatttagaacaccaggatattttttacccgcattacattcaaacttataatttccatgctctatatcaccacaagctgccacatactcatttgccacaaatctttcgcccaccatagtaggtcttacatacgccctcttcataactatgcactccttttataattacattacttcttatcgttcattagttgcctatctacactatattataaaggatcccatattcaaattcaatacttatcttttgaattttacgtctttttattacatttcatccctgcaaacagcgcactttccatccttttcagaaatccatcgccatccggctcgattcttcctcgtccaattccgtaaccttcgtctccataacacggtacaccctctggcacatattcaacacacttggtctgtgtgttgtcacaatacaagtcttgttcggcttctgctcgataatattacgcaacaccttgcgttctgtcgttacatccagtgccgacgtcgcttcgtctaacagaaggatcggtgcattacgaagaactgcacgtgcgatagagatacgctgtgcctgtccttccgaaagaccgcgtccacgttctccgagcgcactgttgatcgtatccggaagcttctctacaaattcccatgcacaggcaatcttcaaagcctcgataatctcttcatccgtagcatcttctttgaccatccgcatattctcagcaattgtaccggaaaggattgtatttccctgaggtacgtaggcgaagaaatgtctcgtctctgcattcaggacgatttctcttccgttggatgcaacgatcacagcctctccttcctgcggacggatcagtccaaggatcagacggatcatcgtcgtctttccttctcctgaaggtcccacaagtgccacgatctcacccggacacgctttaaaatacgaatccgtaataactcttgtcccttctacgtatgcaaaattcacatccttcatcagcacctcgaatccatcctctgcgaacggatccagctcctcactctcactgatatgcatctctttcggaagctctaccagctcccggattctgtgtgcagacaccgaactgttcagaaatgacgggatgatcgaaaccacgttattgaatgcgcccgacagattacttctctgctgcaggaataatgtcatcgttccgtatgtgatcgtatgggtccacagtaagaatagacaatatccgaacgcaataaattccactcccgtgcccataaccgacagcaggatattggtcttgatggagaacatattgtactccagactgacatctttgaatttgccctgccaccagcgcattaaccggctgtaatgcggtgcgatgccaaatgatttgatcgtatcaaaattgtagaatgcttccacctcgaacgtcatcagcttactgctcatttccctggtcttctgactatattctcgctgcttcttgatcatgaacctcgacatcagaagcatgaacggtgcgcttgccagtgccagaattgccatcaccgcattataatgaagaataaccagaaatgtcgctatgaaattatagattgcgatcacaatcgtcggaagccagctgatcgcattactgctgaccgttccgatatctccgttgaagcggttcaacacatccccgttggaatacttattgatctccagccagtcggcatccacaatcttatcgaatatatccgcctggatatcattattgatataaatacttaatttggttgagatacggctgataatgctgctgaacagaaggctgaacaatgaacttcctaccataacaatgatcaggatcatcagtttattcgtcttatacccggtaatgatatcgatcagatatttccccgccacactgctgacaagtcccatagaagtactgaagataccaaggatcgtatagaacacgattgcccacttataccggacactgtagctgaatatccatttccagtcatcaatgatctccgaaaatgtcccgtccttccacttcgcgatcagaatatccagagactcgaaagacaggccgttctttccttgatttttatcattattttcttgcatttattcctctcctcgtccaccggcaagtacatcttccagacatctcaccgcatcttcggatatgtcgcactccagatgatataccggaacctccttcagtaaaatctcaagctcatccattgcctgtatctgaaactcgctgttccatgcattgatcgtaatctgttccattactttccgcagagcctcaagccctttcagacggctgatacggttctccttcgcctgtgacagcataacgattgctctgaccggataggacttattgttacagatctctgagcttccgcagaccggccatccattcgcgtaccatccatcttcttcacggataagaagcgaacggtcgccattcaccgtccatgttccacggtacttttcccacaatcctgcctgcgtggattttcccgtctcagacggcgcagaaaagagcactgccgtatcttcataacacatatatgcagaatgcagtatcatcgaatgatctttaatagcctgcttttccagcgagaaggccgccaggtataccgtatcctggtcaagcatctctgccacttcgggaacaaaccagacatgatattgatttacaccctcctggctgctcaccgcataatgccagtccattccaaggaaattaataaagcggcattccccgcccgacgtctgaaataccgtaagattatcacgatagatcactcttcccgtctttttccccagaagatcttctttgatcttatcaaggttctctgtcatctctacctgataatggataacctcatcatccggcctctttgcctgcccgatccggaatttttccagattccgcggacttttcatagataacggagccgtaatctcaatctccgtatgcccgatcctgtacaggcggatgattgactcattctgttctaccatgttccatcttccctcgtacactcaataaagccattctccacaagcgcaccgacaaaagcgatcgtatcccttcttgcagtctcttcatcaatctcatatgtatccagcaccatcctgatcatctcttccaggctatccaccttttcgatattctcccagatgaatttagccgtatcactgatcgtgatcattccattgaactcctgcgaagttgcccccgtcggcaccagtacacattcacctgcgatctcccttaatataaattcctttacaatcttcatataacttttctccttgattttattgttccatcatagcattgccgccgtctgtatgcaaccgggtcaccgtatcaccttcgcataacaccacataatcccccggcggagcggaatcatatgcagccatacatgctcgaagaattcccaccagaaatctcccggctccagccacttttcttttcttctgactttggtgatcagagcaaatatctgctctctctttaccggtccttctatctgtgtctgtgcatcgcccacgatataatacccctccggcctgatcttccatatccggtgcatgacgaactgcccgctctttctccgaaaaaatacaatatcacctttttgaagctctctgtccggctttttgaaatatatcatatcccttgcatggatcagaaacggtgccatactgcttccaaagaccagcatgctgacttcctttccctcttccgtcagttccttaagcataccaacatattctcttgtatctacaactttcacattcctcatcctgcttctctctatccgcacttcgtccgtcccgttttttcgcaaattatggtacaattctcagcacatccttcgcattgttttttatgtatacattaaatagtactcaatttcttttttatcataccatcgcggttttcttcctgcaacatcaaaatattgctttaatttttctacgtttttcgacaaatcttcgcattaattttatatttttctgtttgattgctccaaattcttatatttttctgttaatatattccatttactgtccatttgtatcatttttctatcttttcactcttaatctatgttatattataattacatagagcatattccatttatatttatataaaaatacgttttatctgttcgggaagggggctatatatgaatattgcaatttgcgatagatatgataccgacataacacgtattagtgagttcttggacgccaatattaagaaacatatgctcaatcatgcattattagaagtagatacctttacttcaacagacgagttgttagcatccccgaaagaatattccctcatttttttgggaattttaatgccggggacagatggtatagaagctgccagacaattgaaagatggtccaaaccctccaataattatcttcacgaccaaaagcactgaacattgcctggcaagctataatcttggagttgaaggatacattctgaagccaatcagagaagaagattttgagaaagtctttaccagacttttgcttccgatattcccttcaacccatacactcaatgtatattccaaccggcttttatatcacatcccggtttctgagattttttatattgaaagcattggaagaaaatgcatgatacatacttccagaaaaacttacgaaaccaacatggcgttaaatcatatcgagagcacgctgaatgacaattcttttatccgttgttatcgcagctatcttgtaaacatgaactatattcaggacattctggataccgagattcaattaaccaacgatgactgtattccactgaccttacgtaagcggggtcagattgtcaaattattcaacaaatttctgatatcccattcgacatcagaataatgcatgtgaaaccaaaggaacctgcacgctatcatgatatgacagccgtgtcgggttcttttttatcttattatactctttaggatcctgcctttgcagtatttacattcgactgcaccgtaagctcgccttctttatctgccgaatcaaagtatgcatttggatcaaatgcatctccaacagaaaggtagatcagataatcttttaatttcacatcaatccctgcataacttttatcggaaatactgatctgcgtcttcagatacactgtattcccgccgctgtccataaccctgaactcgatcggatactcacccgcagcctgcgtattgaccgtcttctccagtgaatacttgatatttgatgtaagatctccgtccaacacactgtccgcagtaatctttgatgacacatcaccggaacgactgtccttctaaccatctttttacctcttcatccctctgatcagtgtacgttaagcaccgcaatctccggccggttattccatctcgggagcttctgtttctcactgcttaatccactcgtcacgaacagccggatccttcctgtccggtacagtccatgcacatatggcgggaaccatccctgatcaccaccatatagtcctcccttgaatggaatgactacctgtcctccatgatcatgtccgctgatcacaagatcgatcttccagtaatcggatgcatcaccgaatacaaaactatccggtctgtggcacaacataatcttgtaccggtctgtattctgaaactcctccagaaaatcccgtacatcacctgtcagattctctgcactgttatctccatccagagcaaatgcatattcatacatcccaccgatgcgcaccttacatccaccgatctccacgtcccggtaaccttcttccagcacacatgcgccggcatctgtaagatccttcaccaattcggaattctccgggtgcttttgcatcttcttcccttctgcagtgccgatataatccagttcatgattcccaagcgcataatacaccgacgcaatctctgccagaccttttaccagtctgaccggcacctcgtcactcttcgaatcctcattcagcatatcgccatccagaatgatcatctccggatcctgttcttttacacaccggatcagcttctcattgtctttcccgaattcatgatcatgaagatccgaaatcaccaccatcttgaatcctgcatctgtaaccgtatccgtatatggcaaattccggaccgtcaccggataccggttcactttcatccaatgataagaaataagaatctccccgacaaaccatatcaggattaaaagaatgatcagaagtaatacaacggttttattctttgttgatccggattctcctgtctctttcatcacgagcctcctttacaaaataataccttatactataccaaatccaccagtaagctacaaggacattcccttacggtgtaaccaaagcgctttatgccgccagttctcggcaaattgactcaatatcatattccggcgcatatttctccgctacttcatatatctttcggatcttttctaccggttcttcgaagagttccgcggttatttcacatgagacgtcttttcgcatttttttgagcaccattctaactagattttgtagttctccatagtttattcctgtccggagtccttcttctcggccttcccggagccctttctcccacacatactcactcagattacacatcttctccacctcttctttctcttcataggtcatcgttattccatattcattttctaatatcttctctttttcttttacttttcctactacgttcttctcttttacggaatatatattaatactgttcttccgtttctccggcgggttaaagcagatccagatgctgtatactttctggatcttctcataatggctgttgataaatatcgtgccgtattgggatgaaatcattctacagccataatatatccctctcttgatcaagggatatcccggataaaaatctttttgtgcctctatattgatgatcagttctatcttttcctggccttggggcaatattgcccggaacatgatgtcgtagcgaacggttccttcattcactgccttatcttcggtgttctctcctctgatctttcccggatcagacgctggcgcctcatcccggtgtacttccctttgagatatctccggtatcccttctatgtagtggtctgcaatgtcacggatactgcagtctttatattctttcatgcagcttttcattatccaggccagtatgattttgttcgcaaggatattcttgcaggattcatcatagatttccttcgctctggacacttccaggtctttgtacaagatactctttctcttcatccattctccttcccgttattttacgtgaagacttgaatggatttcgcaatatctatatatactatacacgatatatatcttttctacaagattccttccgcaaaatacgttttctcattcttataaattgtctggtaatcttgaggggtcttcctctgataaatgtgatggtcttttgagaccgttgaattattctaaatggacagaacgtccattagtaaagttatattaacatgtaaatcttcttgtttcaagtcttttattattttgaactacgctcacccgaataatgttcttattcattggcggcttcaggcgcatcgtgacatagtaataccgacacccggatagctttgcttccccgaatggcggtatctgttcaatggcaaatggtatctgccctttttagttgattatttttactttaaaatacgttaactgtcagagtacctgtagttccgtatttcaccttgattcccaaaagcttgattgtccagtatccactcggaactgctttcttgatctcagaagcactgaatgaatacttgcttccggctgaagtctgtataacatatatattatatcctatacatacctgttacgtcatcaacattttttatcattttttaatgattccatattccttcataagttcaattctctgatttccaatcttcacggaatctgccgcagcgttatcccctcctgccactgtctctttacggtattttaagatacggtctgtccacgcaatcggaagaagaatcggatgtttcttaagatacggataccgcccctcgagcttttttgccgatgggaacaaagactttaagaccgtattcccggctttctttccattcttgtctgctaccaccgcatccagcgtcatattactgctgtgtttccggctcatattcgcatttccatagataccactgtccagaagatccatcagcatatccgtctcatccacacagatcccctgccatactttcggataatgcgccttctccggatcaaacgtcagatatttctcaccgattgcaaataatgctgcagcaaaaagatccgcatgtatctcgcggcactgtctcagaaccttctcccagtcaatcgcatccccgtattcattggcaaataatatgatatcgcacacctgccggatcccgaatccactgtgcaggaaatgcttgaacgaatgacagatcagataaaacagatgatccgtgtatcccattgtccggatatccgttccatcgatcctgatatcaatcgcatcttcatgtacatttgcaaaaaagcggttcagatccccgtatgcctctgattccggcgggaataagcttttgtggagctctatgtagataaggcttcctttcttcccgtatggtacttcgtaaaccgattccagttcttccgcatccatatcctgctccgatgtctgcattccatattcgtgcaacagatcgtggcattttctaaaatcctccggccggatcagcagatcctcatctccggatatccgataatccggattcggataaatgttcctgcacacgatccctttcaccactaacggacagattccgctctctctcagatatctgtaaagcggctcaaactctcccgtcttctgcgtctgcatgatcaccgtgcgcaccatctgcgcctttgccggagccagtatctgcggatccgcctgcccggccgcaggacttcgatatacggcctcatagatcatcggaaggatctggtgcacttccgccatgcggaacaggtccatccattcctgcgcttccaacttgttattccattctacctgttcattttttaatgcggcttttaatgcctctaaaaataattgctgtgtgtgttgcatatgttgctcctatttttatcttctttcatttaatgctttcttcttattcttcaatgttacgtgatagtattccaaattgcaacgccatttaaccacaatctaacatatatttaatcccatcccaccacaaatttcatattcccacgttacattaatcatacagtccaacaaaaaggagcgccacttccggtaatgtcatttacacaagaatgacactgctggaagtagcgcttcttttcctataactatttctttgacttgatttttatcttttcggaatcatttccatattttttaaaattgttttttggaatttctgcccatatttttgttatatcaaatttacatttttttaatctgtcacttaaattactacaattaattaaatcccttttataatctgcttttgtaagactcttagtcaaatccacaatattttttatattacaggcccgcactagttcatcttccaaatttcttacttgcggaatgcaaattacttcttttattcctttttgtcttttcagaaaagctatattttcatctaaaattttcgtattcatctctacatctgtatcatataccagaactactgttgttcccgtctttagcgtgcgcattcttgcagtcgtaaaacgactttgaattacattaaacttatcaatttttccactctcaatacaacgcagatccaacttcaatgtgttaagcagacttctctcatcttcaccctctacataatattgataaataccgctttttctcatttgcatccctcctaattacaaatcagcaatttcaaatagcctatgtaattcaggcgctgtacaaaacagatcattttccaccgcatgctttaacgagtccgtgcttctttttaaatactgagatgccgcaatacatttgattgaatcatcttcgttatttacatcttttttcagaaatgtaaatgaatgctttggcagctgcatatctaatatatctgagttgtgtgttgtgaaaaacaattgctttctccccgagagtttttcaattataatcgacaaacaggccttttcaatgtcactattcacataagagaataattcatcacaataatataaatcatgcatatcacataaaagagaggttattatataagatatttcaagccctgccttagttccactggacattacctcaccattagcgatttttccatccttaataattgctgaacaatttttccattttattacatatgtattctctacttcagaaacttttactacttcctccaccgaagaatcaagtgtttttaaaatctgctgtaatatgtatatatatttactattctcttctatcgtactataaaccttgtcccctgacgaatctatcggatatgaaaatttccatccgtttgtatttactttttcatatgtcgtttcttcacactcatacatatccaatcttgacgcacatgtttcataactgtctcttgtctctattggtgtatagaaaatcttaatatctacatcttcttctgtataacttttttgggtctttggaccgacattcatctcaaatctatataataaattttcgtttgtcacaaaatcgatctgcaattttgctgctttttttacatctgcaattctattagtaaaccgcttatatcctccatcattcaaataattagtaaacaacattaacaacttacccatagttgtttttcctgttgcatttgtacccataatgatattaacttttttgtaccgaaaatttgtcctctcttccagaaattcattttctatagtcgaattcactattttctttggatatgacatatttatatgaaaatctttaaatgcatatatgttgtcaactttaatatccatgataatcatagctcgtcctcctttgtatatttgttcgctttttgcgaagtaatctctcttcatttattatataccccttttacgataaatttcaagcttattctaaatatattcttgcataagatatattagaacacggatatataaattaaagacaattaatctcggcttccaaccattttctccatcccaccatccacatcacacacatacatctgctctttcttcctgtccattctcctataatataccttgtcttccttcttatccatcataaccacatctttcttaaataccctgacctctttgccgtcatagctgaccgacacaatcttcgaccccttctgcgcatacagcttcgcgccggcaaaaaagtactgaatatgatccgccagttcctttctcttgcccgtcgacatatcacaacggataagcttctcatcctccgtacagcagattacatatccaccgattacggcaaattgctttaccggatccttcgtccaggtctttctctgctttccgtcataggttacagatttcagaacattatgatcttccatatcaatatagaaaatccgctcccgcatcgctatgatctctcccaccggtccattgatcagtacactgtctttcgtactgccatctttaagctctttcacacgtagagtacatgtatccggatcccggtacacttcttttccatcgatgcggttcttataccgtctttcatcctccgtctgcatagccggattcccaagcgccttattattcctgatgcccagcatctgcttttcataccactgtatgcacctttcactgtccgcagtcgcctctcttaaaagcaccttctccagctgttccgtatgctctttcgtaaggtacaggtactgatcccgctgcacctgtcccgggatattggccgcaagcattgtcagcacagtcagcccgataaatccaagcgtgaataaccaggttccccttttctcttcttccgctttcctgatatcctcaccgacccagtaccgaatcgcaagtactacaaatataatcaccacaataaccttacagatcaatatataaccaaccttcaataccgccgccagtacaattccaatcattataatcgttacaaataatttcttaataaattgccgtatcgtcatatctcatcttctctttcataatctctctatatatagctaattccggggccctacatataaagccccggaattataacaccggtggacgatatccaaatcctccggcgatttacagtatcccgcaactcccaaaaatttacagtacgtttatcaatgcacacatatcaatatttatcaatactctattatttatattcatcggattttttcatttctttgagtatttcctgcgtatgtaaatgatggggtgcggggctgtaaccacagttcacatgcaatctcgacatagtctttttcgattgctccaatctatataaattcttctttttgtctccctctatatattaatacacataacttttaaaaacctgtcgcgtttttttcaaaaaaatttaatttttttcaaatttctacattttttttatttttagctgtaaaatacgcaaaaaaacgatttacaacaggggttcgcctataatacaatcatctatgaaactaacaattgaataatggaggaaaattatgaaaaagagatttttccaactcgtactgacagcagttctttctgtgtcctgtgttgcaacaggagtaaatgtaagcgctgccccactctcatccgaaggttacagcatcgagaaagtttctcatccggaaagaggagccggtgagactgacggtatcctgtcattcgatgctatgggagaagagagcaaccgtaaccaaagctatgtatggtcctgcgtagaacatggaaattatatctaccttggcacctgctggaatccaatctcaggtatttactaccgcaatctcaagaacaatctgaccaaattgttccagaaccgcggggatgaaaatccggcacagaaagccggcaccgtagcaaccaatattctgaatgttgtgtacaacggtaattttcctgacggagcaacatctaccaacggaactccttgtatcatgcgtgtgaacaaatacacctatgagacagaagttgtctacatcgaaaaagagagctccgcattcgtcaactggaacggataccgaatggccgtagaatacaatggcaaattatattttgcctgcgccggtttcccgacatcccgtctgcttcagatcgatcctgagacaaatgaaaccaaagttgttatgcagaagactgcagagaactccggattcgccaacgggatccgcggactcaccgttatggatggcaagcttctcgtatctctggctaccgacggcgcagatccagacaacatgttcgcatccggttcacagcttccacaggcataccagaatgcgatcaaagcaatggccaaaaaagacgtgcgttacaaagacgataacccacgtatgcagggtgtacgtcttctttccactacaaatccagaagacgtagacagctggtccgttatcgccaaccaggagaccttcgacaatcttccggcctgctggatccgcgacagtatcaacggcggcggattatgggatcttgttccattcaacggatctctgtacgtatccatggtaacaggcaagacagatgccacaacaggcgtcaatcacaaacagggattcgccgtataccgcggtgatccgaaagccgacggaacctggaactgggcaccgatcatcggagacacatccaaaggtgccaaatatgaattcggtcttggaaagaaagaatcctgcgcaggtaatctgttcgcatatggcgaccatctctacatcggcggctataacgacccgatgcttgacctcgccgaaatcggtaatgccggtgatttccagtctctctatgaagatctgaagaacccagcatgcctgaaccgcatggacaagaatgaaaatatcgaactcatcaacgacgacggattcggagcagcttccacacagtatctgtggagattctctgaataccacggaaagctcctgatcggaacattcgatatcgcaacactcgcatccggattcacacagctaaccgacggaagtcttctggaaatgacacctgaagaattctcacagaagatgacttatgtcaaagaacttcttcagagccttaagaaaactccttccggcgcagcactgaccgcagaagaaggtacaacagaagaggccgccacagaagataccgcagaagatactcaggaaaatattcaggagaatacagacgctgataatactgctaatcaggcagctacagaagccgcaaaagaccaggaagcagttgtaacagacaacacaaatgcagaacttacagacacagaagtagatgccatcgaccagatgttagatcagctggatgaaatcgagacactttcttctgacgactctcagacagctgcttacacacagagaaataaaccatctgacatcgtcgatgtatatatggatatggtaaataattacaacaaatatgtaaaaccaatccttaaccgcctgaacccagatcttgcacagaagattgagaacaacgtcttcaacactgcattccatcatttcgtatattaccttggatgcagcaacatcatccacacacaggaaaaaggatgcgacgtactgatctcttccgacggagtaaactttacaacactcacccgcaatggtttcggcgatatctataaccacggcggacgtgcatttattccgacagacaacggactcttcctcggtatggctaacccattctggggaacacagctctggagagtgaccgacggatcagaaaatccgacaccggataaaccaggtactgataagccaggtactgataaaccaggtactgacaaaccggatactgataaaccaggtactgacaagccagatactgacaaaccaggtactgacaagccagatactgacaaaccgagcacacctggaacaacaaatccttccggaactaacaatggtacaacctctggttctacaggtaacaacacatccaatggtcagaacggagcaaccactacagcatctccaaagactactaatgctaatcatgcaaataagaagtctacaaatggcaaggtaaaaaccggtgataacaatcacatgattctttatacagtttcattggttctttcacttatgatcgctgcaggatgtatttatactattattagtaagagacgtaagaacagatagtattttgattattaataaaagcgcagggaaatggcgtatgccattttgcctgcgcttatgttatgcatgcatcgattctttaacaaaatcaataacatccagattcttcttcacaatattaggatctctctccatgtcggaaatactcatccaataatagtgtctgccattaacaacaaagttctccttctgctcatcctccggaaatacttgaatctttatctcgtacaatctgtgattatagatcctattctcctgatggctttcagaatatttctcctgtacttttgacgatatgtatctgcagtttatctgacttttatccacattcagatccgccgacaccttatttatcaccgattcctcatctgctctatccacagtcttgtaattcaaaaataatttacaatcccaccgctcatcgtaatatacaagatacttcttttctgcggaagtatctggaaactggatggcgactaatgaatgcttgtgttggattttatctagtttttgtatgtcatttagtaatatattgtggtcatatttgtttttatgcatttcacatatatcctttattattttaattgcatatatggtaagcgctattcgtatgcaggtgtcaccttcaaattccttatgctcaatctgcctttttctccatctatgtacgattcagcaaagaataccgtaaaacaaacttctgagatcttctccaaagcttctctatttcttactttatcccggaatctatatttaaaatgtcctccaccgatccttacatcattctcttcatctattattttcacaccagtatcattttttatttccaactgaactttctttatagctcctgacgcaaatgcgtcaaattctatggcatatccggcgtcaaagaagccagtccagttatcacaaggaatatatttcatcaatgccatcgcaaattctcccatacccctcttagttacattgctgatatcaacatccatgtcaaagcaatctgcaaatgtttttatctttgcgaccttttcatcaccacaggagataattggttttaccttggaaaatggagtataatccttcaacagatcaatctcttgtctctgagctaccggcgcatcaaatcttgtttttcccttcgtattattcgatccatttacaggatttgacggcgtggttttaacattcttttgctgcgcaataatctttatcttatctaaaaaatcgtctcttttttcttcccattcatcttcatctattgattcaagaccaaactccttaataatgtcgtctctaaattgtctgagtctctgtttcaatgtgataatatccggatcatctaatttaatacagatctgatttttatcaatacatccggctaatttgttaaatgtaaaacctggcaataacaatcctgtccatttacacctcattacccaagctgcacccatttcatttaatgtagctacgctggaataataattatccgaaaaggcgtacacgacatgaaggtcgctcgtctgaaattgtttggctaaccaatcatatatgttacatccaaccggaatattacattgcggaacggaagtacaagttatttgatttttatgcactcctattgctacaagcaaatctacaaatgctttcatatattctgcatctttgctgctgtgtgaaatgaataatttgtgtggtttgtttttcatctttttgtaccttcctttcgggattttattgtttttgcttcgtatttttcctatggcatgttgtatatatttttgtatctattcttttaaaagttaaaatttcttattttttttaataatatactccttatcacccgatacatcctgtcgaaatcgctgataatatctgtcaaacggattgtgataatgaaacactgctgttcccagcgcaatggtggttacaagatttccggatgctctccagaaaaaatcctggtgatccatcatgcgaatattgctatcccagccaatactgcggattttatcagtcctggcaacataaacattcggcaccttgcccataacgaaatgattgccgtctacgcgtgtcatatgcgggattaataacggtttcggcgcatctttcatactaaatctggtaaactcactaaccgcttcgtccggattctggcagcgtatcgctgtcagtacgcaaaaaccaacaatatcaatttccgaatatctctccagaaactctacctgctttcctaatcgcgtccttactgtaagtaattcatcatcatccatacgcatgacatacggcgtatccaccctttcaagcgcctgattaagcccatagctaagcccgctattaaatggcagctgaacgatcgtaagcgagtctcctttcaaatccagaggcttcctgctgtcatctgcaatcacgacccgtactcccggataatatttctgcaaattctcatacaaacgctttgccattttttgacgttcaaaggacttgaagataacagttacattttcacgcacaaactctatctgataacctattgcacaaatcctgctttgtatcttcttttacaatcgcacaataaatgtctactttactttgcaagtctaatactgcatccaagctcactatactattccttctcttaactgttccaaatattcttcaagcgttttggcttctttatattcctcgattttatttattactcttttttcttctttttctgcctctttcttatttaaaaatcccgaatacacccgatacataggattgctatctgtatctgaaaataataattttttctttccattctcatctttcttaatatcttctgctatcgcattaaagatactacttaccatgtaaaatgtaataacattcccaaacaaatcaatattctgttcatttacatataccacaaatataggctctcctatcactgccttgtcgatttcaacatcatttatggactttattttttgattacttctaattttcccattttctattaatagcaaatataatttttctatcagaaattctttttcttctgcctcttttatattaattttctcgtcttttatctttaatattgagagcactttttgaaaacgtctaaaataattgattgatacagttagccatcttcttaattcttccagttctttattctctacgtcctttttaaaaaataaatctataatagcttccattctttcatattcttctaataaatcatttatattttttgctttctccatgtcaacattatagaaggtcataaacatacgttctccaaactgttcttttgttatatatcgcttatatacttaaaggattgaattatatagtcaataccaatgttatgtaaaggaattatatttgcatatctcgttacagttcctaatttatatgcgcatgctctggaataattttcaaaatatttataaaaaagctcaaccttaataccagaatcctgaaacgtcaaattccataaatcctttggatttttttctagttttccaataacttctgcttctccaacaattcctttaacaggggctgttgcatataaatacatgcgagatatattatttttacacaatcgttttcggtattcatattttttttctcccgataatatcttctcaatatattgtggcgctatcggtaaaataatgttttttttattgtcggaacttgtattaatgacagaaagagttacatttagtaattgagataattcaattgcatatttcttttcttcttccagaaaagattgtatgaatctaatatcccatgaaatttcatctcttctatacattctttgttctatttctttcgcagaacactctaccagatgaatttccgtaattggcatatttttaaatacatcggtggaaattctctcaacttctcctttttcatttatcaaacataaatgggcatttaagataaaattttcttcatgtaatacaatttctttcattgtttctaaaagaatatgctgccgactatctatttgatctattttttttgttttatattgcctcaacggaagcgtttgattaattaactgacttgctgtataagtgttcatatcttttttcaattttaggttattactatattgatcttttccagaaccatgaataccacaaacaagaatcattctatttcctcctccatattccaaacaagagccacctaatgaggcagctcctgttttactttttaatatcctgtaattatattaatctccttttggctatacagccattgacgatataaccattcatcaataaacaatttaaaatcatccctaccagaaagtaaaaattgtctgatttctttttccaaatcaatcatttccattctattaaaaaagaaattcttctctggcaaagagccattataaaccagctctgtacgaaacagacgataatacccccactttttttcttccagttcaaaattataacgtttaaataatttgttaaattcatgttttttagaattatgtattgttattaatggtttatcatcatttagccattcaaagctaagttccattagatgttgaccaatcccctgtttttgaaatcttttagcaactcgtaatgtacaaatctttttttctatatcatcattttttaaaatagcaacaccagctaattgataatcacattcacaaataataatttctctgtcgttctttaataaaatatcggaaataaataactgtgagaaccactcttcaaaattattatattcatataccaattttttcaaaaatattttgattcgcatacgatatatacttttttgctcgggagataattcagagtaattaatatataatttgttattaataaatttcattactttatcccctttcacaaacttttagtgttatattatactatcaaatggctcaaactacaaccatttattagatatttttgtaattattttgaccttcctactcgccatccaataaatatcatcaccacagccaatgctaaatccattattaaatttactatattataccctccagagagcctttgggaaaatgtattaattaatggtgtagcagaaactatcgtacttcctgcaactccaagacctaaaacaactaacacataagcaaaaactgtcttcatctgcattttttgataattgatttttgcaaagcaggaaaaatcactgattttagattgatcactggctttctttttccaatgatatgccaaaacatgtccaaatttatcttccaaatcaactttcaaatattcattccaaagatctttttctagttctctgcacgacatttgattctgtgtatatgaaaccatatcatacgaagaaggttccattacgagaaaatgtatctgcccaaattcgacaagcaattcttctttctgttccatccttgctgtaatatttttatcaatatttcttttttcattaattttaaaatccaaaacacgagttccagaaaatgcactgtcaagtgatttattaaacggctcactgtcaaaatataagatattctctaaatcaatattctggattctaaaacgtatatagatgtcagaataccgttccaaatcactaccactattttttaaatatgttctgaattcatcaaatttaaccgttatgtaacttttttctttatagtctgtaagttcataaatattttcaaccgcctgctctaacggaaaaatcaaaagctttttgtcatctgttttctctttcccaggaatcttgataagtgtatattctttctgtgtttcaatttcacattcttcattaaatacgattgatgcattatttttcacactcattttagatgccaaatctacaagattcttttgtggcacatgaaacggaaagctaaatacaagattagataggttcttataattttgaatcttaattccaatgtccagatacggattttttactttgccttttaatatatctcctaaaaaccaaaaattcacatgtaaatcaaattcaggatttttgtcatctttatcttcaactaatttataccagaatccaaaactttccaatatctaacctccttaatataactatatcttattatatctttttttattttcaaacacaattacaaatttaattcgtgtaaaaaataatattcaactttatgttttcaccttaaacttcagctgtaaatagaaaacacccaactacaactattctttttctctcttctccccgtcgaatctctgtaagcgcttacttaagaaatacttatccacattgtagctctgtttcttcaactttccacagttactttcttttcttaaatcttcccattattttttgcgctttatttagcaaatattttccttcttctgttttatggtaacaactataaaacattccatttgtaacaatactacaaatcaaaatttttattataacatttataagtactgtaaaatggcacattctacataatatatagcatattcctcctgtaatacataaaattccaatatattccatatattttttcacataatatataggatttatctttaaaccatatttaaatactgcataaggttcataccaagtatttgttaacaatcttgatattgccgatgctaaatatatgccaaacatgccccatttatatcctaataaaaaatctaaccccaagttaattactgccgtaagaattaaaagatattgcccatatttaaataaccccatcgtatttttataagcccatactgcattttgcattcctagcatgtaaaaattaatagctagtatcaaaggaatattaaattcaagaacataactatttccaaaacataattttacaatatctccacacacaaataatattccaattgttccccatccatatatccaaaaattagtcaaatttaaaaccttaaaaaaactatactttttttctttattttctatcgcatttaaatttcctacactagcagttaaaccattaaaaatttgagttgccaacgctcctaatgtatttactaataatgtataatttgaaacaacacctacagaaattaacccttttaaatatgtaattatgatattatccgtattattaaccaatgtactacttaatttattaattgtgagtgccttgacatttacaaacaacttttttctttcctcttttgttagcgccggagcatttttttgtgtaataaacggatacattttttttgcaataaaagatattaaaaaattgaatataaatgttcctactgtttgtactactagataaatcatataattatgagttaaaattaacagaggaatttgaataacgctttgtattattgtaattatataattaagccctaaaacaatgtaatttttttgagcagcagatattaatgcacttctatagctaaaaaaataagtgcttgcagtattaaacaaataaagtagataaatagtataaatactctctgagatatttgggggggatattataattacctttaaaaatggaatcataaaaagtcctaaaagcgccacaacacatccaattattctatatgcttttccataaaagcccataagagacgctattttttcattatctttttctgcaataggtttatataatgcataacctattgctcctcctattccaagttcagccaatgacaacattgataaaatatttgttaacaatccatttattcctaaatagtctgcattaagacattgtacaaaaacgattctacaaatataacccaaaagggtattgaggaaatatccaccaaatcctgttaaaatattcattatagaatattcacttcttgatctgtcaatcatatctataatctcactttctataaaatgtatttcttcgtataaaattcattttctaaaacgctatagcatctccgcaataacctcttatcaaaatcctatatccatatcatccttaaatgtctattgttcaatatcctttccttgtcaaatcttctatataagataattgcaaacggtccacataaaataaaatatcttatggttactttttgacttcttttaaaattttctttacatccttctatagataccatatcttgattacttcacatttgtttttaatcaaagtatagtctttcataaatattaatcattaatttttttatcataattctcttttttaggtctccaccctaattttctaataattcgtaaacaccaatacactactggattcatcaatttataatagttgatttgctgatttatctctatatttcctttatgttttatattttcataacatgattttgcaaaatctttatctttatgtttcaaagcaatatccaaataaatatttgcatataatttatctattttatcattccatttatcttgatcatcttcattcataaattgtttcaccaaatgttttcgaatatctttatatccttccattgcatttagctctttttgcatcacattaccagatgaaaaatgtgataatgattctttttgtaaaacatatttcatcaaaggaatatctataaatcctgctttacttacatacgctgccatcataactaactgcatattctgaccatttcttgaaggatatatttctctatctggatataatttatctaacacattcatccgtatcatataagttcctggccaaagatatgtcgttccattaaacaactcattaaacacattttctttatttttcatatattcatttacttctaatagtcggttacataattccaaattatcttctgtaacataatatccatttgtccttactaatccatatgtcgaatgttcttctaaccatttacgccttatttcaattgactccggtagcataatatcatccgcatccaataatgtcaaaaattctcctgtcactttttttaaagcattgttacaagccgcacctaccccttcattttcctgactaatataaataaatcttgtaatatcactttctaatacatgtcgataatcttcaataattctcgctgttttatctgttgatccatcattaaccactatcaattctatatttctatcggtctgatttagaacactatctaagcaacgcccaatatatttctctgcgttataacagggaataattaaactaaccattttttattctccttacaattctctttatacacgcaatagctttattttgtttatttctcgtttttattttgctctgatttaattcataaactatctcttcaattttcttattattccacatttcgtaaaattgatttcgataatagtctttatctattctattaattaaactctcattccaaattgcgatttcttctgtttttgcaacacaatataccaattgatctaagcaatctttaaaccaacgttctccttttttcgaatgaattataactgaagatactccatattgatttaacatttccggatgaaattcctttaaactccagaaatcccctatcgtaatatcgctacacctatcaatccctttaaatttacactcaaaacacgaaggtcttacataatagttatttataaatccttgtatatatgaactttccttatagcgctcacgaaaaacagaaccatttgttaaggtataatctaatgttacatcattaattccccttgttttatttcgaaactgcatagatataaccttattagaaccaaattgttcttttaaatatcttttccaaactcctggtgaaggaactccatgacatatcaaatcgacacacaacaaattatcatagtcctcatttaagaaagcttttaatccagctatctggcatggcgttcccgagaataaaatcattcttcctttttttaaattttctttcaccttgacaaaagttgtcccgatactactttgtatatattttgttccttttactttatacaattcgttattatcttcaatactaatatggcctagttgcatttgattatcaaacgctgctccaaataccattcctttattttttaaaatttttcttgctattattgcaaaaattccgccagaactactcgacatatgttcctcctgattctttgcatagcatgcatatgcagcagtatcactatttacatgaggcggatttatgcttggacaagctcttaaacatcttttacaattaatacacttttcttcatttacctttggatactcaaacccttcctcatcctctaacatatcaattgcatttaaagggcaaatattataacatgcataacatccataacacttctcttttttaagaccacttatattacaactcatattttctccaaaatagttttaatttttcttccttgttcgacatagttcggtatagtttcttttaaatgctttctaatatggatttctcgttcttgaatccattgaaatgcatttgtaagctcttctccattccttaattcttgtactggcaaaacataattttgatctgttccaaatatatctttagcaattcctctagctttaacggaatatccaacaactaaagttggtacctccgtagaataagcagctattgttgaatgtgtccttgcaccaacaaatattctgcatttagatataatgtattttaattgtggtgctgtatgatcatttactaaaataatccgttcattataattaaactctttatatattttttgcaatatcgttcgatcatcattttgtttccatacgacatgtgggattaacgcaatatacatactcgtatgatttaaaatatactctatcattttccgataattttcatatgcacttccattacatttttcattggaaattatcatcggacttatattaactcctatcacatccccattctcaaaccttttatctaagatacatttttcagatttcatatagaatgctggatctggatttaatatcacatttgctcctatttcctttaatgattgatatgtaatactttctctcgctacaatcagattatatgattttaaatcttctaacactttctttttctttataacttccggctctatagaacatccccataaaactgtttttattccttttttttgatattccttgttcaaaaaagcataaaatgcctgattttcatagcaataattatctccacctgcagataatgcaaaatctacttttccttttattttcttaattgaatctacatatggtaatccatccatatctgtataattattttttaattttaatttcatgtacgctcttattaaacgggctttacttattttcccattttttgcatctaaaacattacaaaattttgctaatccatatataatgtcttcgtccatttcttctgataaaattgttaaaggttcttttatcaatgtatatgtacctctaacaattgcctcacatccatgatttccactactaccatttccatacaaagcaatcctcatctttcttcctttctcattcgtccaaacaaaaatcctaacggtccatttgctacttttataaaccaccattcaataattaacaagcctactgtaaaaagaatacttccaaatatccctaatcgaataagaatgttccccgtaattttataatctatcaatcttatcatttctatcagcagattattagttactagcaaaacaattgtattttttccatatttttccaaaactaataataatttagaattattgctctcagcatttttaaataacgccagaacagaaactgatgtcattgttgcacacaaaaaataaactacaggatttccaatccttccctctatcatttcaacggaaccatttacctgcgctagcatagctgcaataattaacaagatatattttattctacctagtttttcaattatcaaatattgctcaattaatataccaatttcaacaaaacaaatgcccagcataattttgtaaatagtacttccaatatgtatcgtagattttgtactaatacatattattaaaaagacaaaggaaattattatatctctccatttatatttgtaaataattttcattattatctctgaaaaacaatataccggaataaaccataaggcatctattccttgaaacgtaattactcgaagtaatctactaaaaaaagaaataggttgaccatcaagcaaatccaatattgtataaaataatataagaactccaccaaaaaacaaatatggaattcctaatgtgtaccatcttcgtattattttttctttcaataaactatagcttttttgtcttccttttctacacattataattccacaaataataaagaaaatcggcatatgaaaagagtaaatccatatatgaaggcaattaatttttgacattgtatgcccaaatatcataaggataattgccaatcctttcgtaaaatcaatataacgtaaccgcataattataatttttcatccaataattcttctatcttttttataatacaatctggttcaaattgtttaattatatttgttgcattgtaagcacatagttctcttttttttggttctttatataatattttaattaagtttgtaatatcaacttcattattatctaccaaataaccatttttcccagactcaataaattcctctggtccttttgaacggacggcaaccactggcgttcctaacgccatactttctataattgtgattccctgagattcaactaacgatggatgaatcattaaatcagcttctgctatatatggatatggattactatttcttcctattaaaattaattctttttgtaattcataatcatttatttctttttcaatcttttctttttctacaccatcaccaattataacccatttaaaatccattccagccgctttcaacttgcatccaatcttcggacataataacatatttttttccggtgtcattctaccaactgatactattttaaattttgtattttgaaactccacaggcatatatttacgcgctttttttattaactcaacaggatcaatcatattagacactacatacagttttttctttatatctgcaaattgttcttccaataattttttgctactattagataccgcaacaatactatccatttttttatacgccatatctaaggattttatctcatgataagaaagattcatctctccatgatgccaccaacttatttttttatttgcttgaaacgtaaatgctgcaagttcagtacaaatccctgggcgatatgcaataactatatcatatgattttcgtaaatctttaaataacttccgcatacagaccataaaatgacgactcacttttgttccacatatatattccactctaaaccaaaaagaaaaccaatcttttttccttattgctcttaccaagcacggtactaatcttccaaaagcattgtctaatgaatatacttttatattaacctcttctggaacttcctccaaataatcacctgtatgttccaaaagtaataaatctacttcatattttttataatcaagttttttcagaacatctattaatgatctttcacaaccacccgaatctaaatgcccattaataaataaaattttcttcttcattgttcacttatttttcttaagaatcaaagcattaattcctaatctgtatttatatatacctgttaaaatttttaatttaatcggaatttgcaactttaatatatgtattctctcgaacatttcttgcacttcattttccaacaaaattctcttacacttatctatcttttcttttttactgagtaaagatgtagaaatgatatcccctaccgcattatatacaaagaaaagaaggaccaaatcaatttgatgtgaaaggtcatatatttgacattccgaaaaaatctctttaattcgtttatgtaacttcttataatctttccatttatcgctaacaaatgtatgcgtcgccgaatcaggattcatccaataatgataaaaatatttacctttcatataataaaatgagtttgcatgatataacatctctgcaccaaataataaatcttctgaataacgtattccttcttcataataaattttttcttcttcaataagtacacgtttgaaaaggcaaagccaattagaaattgtaggaggatactctatattttccatcataagtaaatgtggaaagtattctttttctatctgagtccgattataataccccgcccttatgtcatgtgtatatatttgttgttcatctttatgttcttttacacaatcacacatcactacatcacaatcatattcttctgcaatctgaatcattgattgatacataatcggctcaatataatcatcactatctacaaaaatacagtactctcccgtagctactttaagtccactatttcttgccgctgctactcctgcattttttttatgaattgctttcactctggaatcccttttggaatactcatcacaaatttctcccgaactgtctggagatccgtcatcgaccagaataatttccagattttcatatgtctgtgttattattgagtctaaacatttctttaaaactgcctctactttataaactggaacaattacacttatttttttcataactccctcattttattaacgcatataatttttctaattcctgtctatttgaataatcatttttatacgtattatcgattaactgattcatacgtttttcatcctttagaagttctacaatcttcatagcgcattcttcatttttcattggtactattattccatcatacccatcttgcaattgactagctgatgtcgcgaaatttgtaataacaacaggcttgtgtaatatttgtgcctcacgaacagttactgcctttccttcatatctcgatggctgaatatataaatcacacccttttatatatggatacggattgctctttttcccaagtaatattacattttgttccatattcgcttcttttattctcttctgtatcaagccttcctctccaccgtaccctatgatataccatgttacctttattcccgtttctaaaatacttttacaaatatcgggaacattatcaaaatttttagcatccgaatagcgccccacagaaagtaacaccttcccttttttattcggaaacaaatcttccctcacctcatttgcttgattttcaagcaagtttgtatcaagcaagttttcaattgttatcgccttatctttaaattcaggatatatttgaacaaatttttctgtacacggtgttgatacacttgctatataatctatttttgaatacaattctctatctctttttttatttggattcaaaacagtataatccgtatgattccacgcaactttaacttttgcatcaaccctttctatcaaaacatctggcacaccaagaaatgaaattccaatatcatattttcctggtatcttaggcaacaaaggtaaaagtgacttagatatgtactgcattgccatccaaactccagtattttcttgctcctttatacaatgtattttcatagaaaactttgcccacagccttgccactccatacttccattttttacttaataataactcttttatcggcacatcaaaggttccatattctggcataaccgaaagtacctgcacctcttttggaattagctcaagaaattctccttcatgtctatataaaaaaagcgaaacctcataattactataatctatactcccaagtaatcccagtaaactgcgctccgcaccaccaataaacatcgatggcataataaataatatctttttcttcataattctctgtcttcgatcggcactattttaatagccctttcctgtgtaacaatagacgctggtggaatatattcttttactacacaccccgcgctaatcacacaattatctcctattacagctccttttaaaataataacatttgccgctatccagcaattatttcctattattacatcacccatagtatgctcaaatagtacacctttttctttattaaactgatgattattatcgaaaattttaacattcgggccaaattgacatccatttcctatggttatgttcttttttgcactaatcattacattctcgttaaaataaaccttatcaccaatttcaactttcgcattcttatctgctataataacgcatcgtccatcactaactacattttttccaatacatatctggcttgttttatgaacctgcaattttgtattataccccaataatacaattcctctaatctttaaatttttacatttaaaaaactttattaagttatattttagtacattccatgttactctaaaatatggtttcattcatctaccttcttctaaaaacatcttttccaaacatccgatgaatcggttttagtacctgacttcttaatatttcttttttccccatccagcttttagcaaaccagtgaattgaataggtctttgtcgttttattaagtcttcccgtcggatcatcatatggattaaaatattctattgggaatatttgtgctccttctatttgctgcttctgtccatttcgtattagaccttttttttccaatgcttctgtattcaatattggacatcctcttgttccatgttttccgtcaagaagtggattatattcttttagcatcccttcaacaatcttatttcctctctctgccccaaatcctactcctgtatttacatattcttctgtctcaaatccaaaaaatgccggatacctaagcaattcatccaatggccttacaacctccacatcaacatcaaaatatattcctccttctcgaagaataatttgcagacgtgcataatcacttaaaaatgcgaactttttgttgtcatatgtatacgtcgtataagcattttgatatacatcataattgtcttcattccattcaacaatttcataatctgggcaatattttttccagcttgcgatgcacttttttgcttttgtcggtaattcattctttccaaaccaacaataatgtattttctttggaatcattagtttctcctttttaattgaccaattttcaaattaatttacactttttcttaattacggtcgttaatatccatcccaatggtgtacataaaacagtaagtacttttctcggtgattcactaatataatttttatttcctgcaatcaaactactagagcaataatgtatacaatctctaatcaatctcttcttacttataggataagtcattgccacctttctcaaaaaagcaaatcctttaggatttttcaaatattgccggaacatcgtattgctcgatccatccatttgatactcaacatcacataatacatcattcagcacaaaaagcttatatttttgatcaattaacgtatatttatacaccaatccaacatacttttcgccttcaaacactggatacggtggaacactattgataacatctgtacgataaactaattttttatctccctctccaccagatgcataataacctccaagtgtggtctctcttaatccatccggaaagccttttcctatgattcttccggtattcatatctgcatccagtcctatcaaaccggcataatttttatttcttactttcagccaggcagtttttatttttttcacagccccttctgccattctatcatcagaatcgatacatacatttaattctgtatgtatattctcatacgctacattatgagcagtgtgcattcctccgttttttttataaatatactgtatctcaaatccgttatcctggttcttccagccttctaccagttcccttgtattatcacttgatccgtcatctacgattaaccatataaaatctttgcattcctgctcacaaaggctctgatatgtacgtggtaaagtgcttgccctgttgtatgcaggtgtaaatactgttaataatgccatatcagttcacctctgccttcctaagataatattcttccagccattttgcgtttgtctctacatcatattttgcttttttgatttcttcacttctgtcacgcttgctaatctttacctgttttaagatttcgcctgcccattgttctggagtttcttccaacccttccactttcaccagatcttttgtaataatacattcttccgacactcgatccgaaataaccgcaggcactcctgccgcctgctcctcaatcattgtaactggaagtccttcgtataaggaggggaatacgaacacatccattgcctgtaataattccgggacatctcttctaacgcccataaaaatgacattatcttgtaatccccgttcttttactttattttcgatttctttccgcccttctccatctcctatcaacattaatcttactttttgattcttttcaaaacacttttcaaaaatgtctatcagaaatttatgattcttctgcggattaaatcttccaatgtgtccaataactagatttttttcaagatctagctctttttttattttttttgccttttcttcttcataaatatacttttccgctgcaattgcattcggaagaagccgataagtttttcctccaaacatccagtctcccgctgctttaccacaggcaaataattccgttgctgtttcagggatctttctcatataatatcttttaaacaaatatttaatattcttgtcttgattactgttatgactatgcgcaattcgaaccggaattccgcattctttcgcacattgcaacgctacagaactcagacagtcctgatgtacatgtacaatcttatattccggatgagttctaaaaaagcgtctcaattctgctttgtatcttctactccacggcacaagccttgatacgtgatagattcttccgcctaaagactttatttcctcgtcataatccgcttcaaattctctatgcactaggaaatcgaactgtactttacttcgatctatatgacgataataattcataagcatcgtctcaagacctccgcgccccatatatgtaacaacatgtaatactcgaatcattattctccctctatcccaaaagattattaacactatacaaatagaatcccagataccccactaccattacaacataaatcaatcttgctgatcgtttggtaaacatatgatcaatctcccatggcaataaaatataactatataacgagaaataaattggaagacgaccaataaatattccacttgtgaacatagatactatatagaatccaacagatacgattgacatattcgtacacagattaataactttatcatcttcattccgtataaatcttaatcctattaaagacagtaccgatggcactgcatacactaatacacgcaatgcattcgttccattatcattccaactctgccagtcagacacaacatttttatattgcgtctcggctaacatagaatccaacacatttgtaaactgcccaataccagccacaattgcaataaccgcaaccataaaaagtaatgtctttttattccatgcctttccctgtgcaatgaagataaatggaataaccagtaaagcgctctgatgcatcaatgaggcaatcagaattaaaataattgcttttgcgtacttcttatccagtataaatttaattcctatgaacgtaatcgtaaccgccagaaactgtcggataccattgaacatccatgaaatgtaatccgtcgaagcaataaataagaaaaagcttaacagatatctgcttgaatatttacgatatacatatatcagcactcccgcctgaatcgcagctaatactataaaatatatattaacgtgatttcctacaatacatttgatgaccgccgacacaaaatagaagcctttatccttctttactgttgccatataagatgctataccgcctaaacttaccggcatttcggaaaagctttttttgtatgcccacgtatcgcctatatttcctctatatccacaccatataatcaacggtaagaatgtcacaaccgcccacaccggtctccaccgatattcttttttcccacacaccgtctccactcgtttcaccgctgtcaacacagacagcatcgccatcacggcaacccatccgattatcaatatataattcttgtccatattcttctccaaataattgattgatattgcagggattctcttacctgcttcatacgtttttcaacacttaattctaccatatattccttaatattccaatacagcacgataagcataactcaccatttgtaccgatatctcgtaatttataacgttttttcttatttacctctcatattccatttctacccctacaagttttatatcaccttcttttccattcataacacttcacgttttctcatgtatctcctttttctattttttcgtcattttaaccatattattccaacttttcctattgcaattgtgcattttgtatgatatgttgactttaacacatttggtgtttacatgatgtaaggaagataattatcgtgtaacgcccaacacacattggcattactgaaaggaggcctatatgtttagaaaaagttattggaaaaagagatttgctcctgtcctggcgggcgcactggtaatttcttcattactggtaccgcctggtcatgcattcgcagccgatccggttacttccgaagaacagactgtaagtcctgagacaccggaagttaaggacgtaacggattccaccgatgcagcgaccaccgatgcgaacctgaccactcccgattccgtttcagattctgtatcagattctgtagccggtacttctgcaacagatgcttcatccggtaaggaagctgctaagcaggacgtgaaagagacgaaggaagtaaaggcagctgacgatgcagttaccgatccgattccggacaagactcctcacctcgtatacggtgacaagagtctggctgatgaagatgcttttgttctgctgatcttcggcgacggcttcactgcttccgagcaggattcgttctataccaatgctcagaataccgcggattatctgatggatacttctccttgggatgagttcaaagatacgatcaagatctacgctctcggagttgtatcgaacgaatcgggcgcaaaagcagatacagcgatcaaccaggagcaggcgaacgcagacacacgcgacacctacttcggatcttcattctggtcaggcggtatgcagcgtcttcttacgatcagttcggatggatctaagaaagcaaagcagttatcagatcagtaccttcctgcggcagactttaatgttgtgatcgtcaatgctaccacatacggcggaagcggcggaagtgtatgtgttgcttctcttaataatgaatcccttgagatgatgcttcacgagcttggacacaccactgccaaactttcggatgaatatttcgcaggtgcaagctatgcggccgagatgccgaatatgacagctgagtctgatcctgcaaaggtccgctggtcacgcttcatcggtaagaatggtgtcggtgtctatgaatatgacaatggcggtaacggatggtaccgtccacaccagaattgtaagatgcgtttccttggcaagcagtatgctttctgcgaagtatgtaaagaacagatccgcaagaccttctgtcaggattcaaatgtaaccaagttattcttccagccttatgcagacatgttctatgagtctgacacaggcaaagatatgcgtgaatattttatcctccgcagaggtaagaatgagatcacaggcgataagcttggtgatgctttaacgcttacttacaaggatgcagatggcaacgtagtatccggtattcctaacaaagccggaacttataccatcgaagctacatttgccggagacagcacatatgagaaatgcagtcagacagctgcctacacgatcgaattaccggacctcatcactctcgatgttccgtccaaggtatacgacggcaaacctgctgaccttaattataccgttaattatgacaaagactatacggtaaaagcgcattataaaggaacggttccttacgccgctgaaattacttataattatgacagcgacgatgcgccgataactcctggccgttacaaagtaacccttaccgcttatgacaaagccactggaaccgcgatcagcagcaagaccaaagactatgagattaccttcaagtccacgactcttcagaataacgacacagccgattatccgggtgctatgccttattacaacaataagacgatcgtattctccggagaaggttacacagccggtgaacagtctcagtttgaagatgttgcaaaagactttgtgaagtatttccgttctacagaacctttcaaagaggctgacacgtactttaactatcacacagtagagaccgtatccaatgaatccggcatcggtcagaaagccaaagatacttactacaaactaacttatgataagaatgggaagattgttccgacagacgaaagtaccgccggtgcaatgtacatcggtaacaatatcattacctcttactacaaggctactatcgtcattgtaaatgataaaaacgtaaagacaggtactacattcaagaacaagcgtttcaccatctacacgacagcagatgaggccggcatgcagtttgcggcaaatgaactgcgcaattactttaccaaccacgaagaaggctatactccttctacagacgccgagaaagatgcggaaagaaccgaattcctgaaagcactttattacacctggtatggatctgattacgctccggtattaagccgtgcgtatgacgagacatttacggagaacggatctccgatcgaccttgcaccatatttccatacttatgtattgggcaaagaggtagagggcgttgcttataagatgacttactatgcagatgataacggtgctgtcggagaagaactttccgaagttccttccaaggcaggtacttatcatgcgaaagcggagcttgtcatggacgatgtgtccgcgtatggcgagccttgtaagaaggttactttagacggtgagacatattcgcttcctctggcacgcggatggaccacttacacgatccaggccaaagatgacccggagaacccgaagccggagaatccagatccagagaatcctgacaaaccggatcctggtacaccggatgatccgaagaatcctggaagcgataatcctggacagaatctgaagccgaatcagaacctgaataataacaagaatacaaccaagaatataaatattaacaaatcaaccaacggcaaagctgctaacaaagctgcagccagaaccggcgatcagtcaccggtatggatgtacacacttctttctctggcagcacttgctgtgatcgcagctgtgatctgtaagagaagattccgtagataaggtagataaaaaagcttagataaaaatctttaataaaaatctttaataaaaggaaactcctttctggcacctgccaaaaaggagtttcctttttaccgtctttgattatattatactctctcgattccctgtatcgtcttcttcacaaccttatccttatcgaattcccgcgccatcttatctctgccgcatactcccattgcttcgcgttctatacggctcatttggacgatcttactcatcttacggtacagatcattccagtcctctgcttcacacagaagaccgctcttaccatcgtctacggcttccttacagcccggaatattgctggtgatcaccggccgtccggtcgctgctgcctccagaagtacatttgacattccctcatgataacttgggagcacgacacagtcggccatggcataatatggtctcggatcttcttggaatccatggaatactgcgatccctgcatccaccagcttatcaatcttttctttgtattcgtcttcaaagaatcctaccagatccagaacgaacggtacttcttttcgctgtagttctttcgctgcatagaacagttcgtccattcctttttccttcatgatccttccaagatataggaaatgcactttgtcattctccggatatttctgataagtataatacttaagatttactcctgcccctttaagcagacacatctgttcccgacggatgatctgctcctgcaggaacaccttcgcatttcccttattttcgaaatacactgtctttgccttttttaaggctgttttatacattcttataacgatttcccgaagtcccttcttctggaatgcagttccgagtccctgtacgttgacacaatatgggatccgcatctgtcggcaggcatatccggcatatacattaggcttgatcgaataggtaactaccatgtccgggtgatgttcttttaataaccggcggtaggtcagatacagcttcatatccgtcttcgggttgatcccacggcggtccacatccgtctcgatcatcgtacatcccattgctttaaaatcatcctcatgccctacaaatggtgtactgatgatcacgtcgtaatcttccataagtttcccgatcaattctcttctgaactgccacagcatataagaatgattggtgataaccataagtttcttcttggctccggttccgccttctacgactccgtcacttcgaagcacggagaataccgttccgataaagcaacggatatccataagcggccccatcttttttacatactcgccgtccagtctggctttgacagggatctcaagttcatctcttccgttgatctgtgcccatccggtaagtcccggttttacatcattagctccgtacttgtcacgttctgcaatcaggtcatcctgattccacagtgccggtctcggtccgatcacggccatatctcctctggcaatattccaaagctgcggaagttcatccagtgatgatttccgcaggaaatgtcctacttttgttatgtactgatccgggttctccagaaggtgtgtcggcttatcgtgcggcgtatctgtgcgcatggagcggaatttgtacaggttaaaatattccttatggattcctactcttttctgcgaaaaaaagacaggagctgtaatcccgtcttctttcttgatcgccacaataattgccagatagacgggtgataataccaccagaccgatccctccaagagctcttcctattatgttcttaaccttcatatatttcctttgtctgaaagacaaatgatcctctttgaacatatctgttatgcctcctgtattctctggttctattgtgttgatttatttaattttggatgataggtcggaacgatgctttccacgatcagacgcatatcatcggtctcattctgtgctgcgctctcaaggactctgagtgcatgtgcgagcttgacttcatctacatcgatcggatgtccgatatgtatcagcttattcggtgtatccgtcataccttcttcgtccatcagaagttcttcgtataatttttctcccggacgcagtcccgtgaattcaatcttgatatcctgatcgactttatagcctgacagccggatcatattccttgcaagatcaaggatctttaccggttctcccatatccaggacgaagatctctccgcctttggcataggcacctgcctgaagtaccagtgataccgcttccggaatcgtcataaagtagcggatgatctccggatgtgtgacggttaccggtcctccttctgcaatctgttttttaaataacggaataacacttccgttacttccaagtacattaccgaaccgcactgctacatattctgtgtccgattctttattataagtctgtatgatcatctcacagattctcttggaagctcccatgatattcgttgggttgacagccttatctgtagatatctgtacaaatctcttagcattccatttatctgccattctgaccatattataagttccgaggacattattcttgatagcctcgttcgggctgccctccataagcggcacatgcttatgtgctgccgcatgatagatgatctccggacggtactgttcgaagatactgttgatacggttctcatcacgtacagaaccgatcagcaccaccaggtcaagcttcggctgttcccttaacaattcctgctggatatcatatgcattgttctcatagatgtcgaagatgatcagctgcttcgggctgtgctttgcgatctgtctgcataattcacttccgatcgaacctccgccgccggttaccatgatcactcttcctgatacataatccatgacctcgttcagattgacatggacttcatctcttcccagaaggtcatcaatattcaccggacgcagtttacttgccttgacctctccgttgaccagctgatatactcccggcaggatcataagttcacagtttgtatcctgacagatctccacgattggtctgatctttgctgcatttgccgatggcatcgtcaggatgatctgctggacattgtatttcttgacgcttttcttgatactgttccgattaccgacaaccttgactcccttaatatatcttccgatcttatacggatcatcgtctatgatacagacaaccttctgatccagatatttactgttctggatctctgtgatcagacttcttccggcctctcctccgccgatgatcatgactttctttctctttgaccatgggaatgtacggttctgtctgcgcagacgtatcagtcggtaagatactctcgttgccccgatcaggatcatcagataaattgtatccagtacataccagcttcttggcataacgctccatgtaaataagatgatgacaatcttcgctacggccgccacaagacaggctgcgatcagactgaatacttcttcaatccctgcgtactcccataaactactgtagatacggaaaagtgaaaatataattaatgttatgactatggtgaatggtccgtatttatagattacttttaagaattctttcggaatctggctgaaatcgaactcaaaacgtgtcagtaatgccagaattgatgctgcgataatacatatgatatcaagtacgataagacctattcttcttatcagtaattgataatttatttccttttttttcatacccatttcccttttgttaattattctcaattaataattataacatactttttcggctcataaaatgccagttactacaatctgcctcttctcatctaattttcttctaattctgaaatgttacaacaacgtctttcccgtctgccacatttttaaacatactcttgattactttctttgcattcttgtcggatacattgcagactttatttgttatgtagcgaatgatgtagtgcagattcagatgaatctgccactgcgtatccttgcactgctgcttgctcagctgatggcatctatgggagtggcattatatatggtcgcagatatgggaatcgctccatatgacagtgtcgcaattataaatgcctgcttcaacggcccattaattcaattttttaaaacaaaactggagagattttacaagtaaaatctacggattacaattctccaattcttgcaaggctcatatccagaacggatacgggcctttctttttcaccagtagcttcatccaaaccttcacattgaataatgaacccttctctttggtaaaaagaaattggatatacagcgatagccccttatattttcggaaatcggaaaataaaactcgttccgataccttcgatactttcgacgtgaatggttccattgtggagatttacaatccagcgcaccatagaaaggccgagtccggtaccgccattttctctggaacggcttttgtctatgcgatagaaacgctcccagattctgtccaggtgttcctcacttattccaataccatcatctttcacttcaccgacaatctggtcattttcgaccttcaggataacatggatatgtccatttatttttccgtaattgatggcgttggttattaaatttatcatcatacgcaaaatcaatgtctggtcgccgttcataaataagtcgtcctgcttttgcagggtaatctcaatatttttttcctgtgcttttgtctgcagttcttctattacaagttcgcttaataatccaaaatccagtttttccatcagatgctgctcgccctgttcgtttctggcgatcattaacatttcgcttgtcagctttgacattcgttttgcctgctttaagatgactgcaatctcttccttatcttccgcagataagttttcattttccaataagtactcacactgggaaatgataacagcaacgggagtccgcagttcatgggatacgtctgatgtgaattgacgttccttctcaaacgaaaattccaagcgctcgaacatttcgttaaatttctccgacaattcgtataattcatcttttgcttttggcagagacaatcgtttggaaagatcttttccattgctgatgttttcaacttcatcgcagataagatccacctgtctcaatgcccgcttgatcataaaatatccaatggctccgatcagaataatgagtaatgggaatacaatcaacagcattttctcggatgtctgcatgaaaagttctatagaatgtacggaggtaattcctcgtacccacatttcctcatcatcaccgtaagtgtagacgctgtcatatatcatccattttcgatttgatccggttatcattcgcggtgtattcgacttgaggatagtttcttctggaaattgggttggaatcgttccataaagtaagcgtccgtttttgtcataaatacaaaacataataccgtcatcgtaaaattcggtatcgccgtcaagataaaaggaatcatcctgaaaattaatatttgaagagaaaccggtcactgcggcaatgatttcttcttctgtcgcagaaattccaaccttatccacaaaaagaaggacgagaactaaaatagtcccaagaactacggcaatgattccggtgtaccatagcgtaatttttttcttgatcgtcagctgtttcattcgttttccctcattacatatccgataccgcgaacagtgtggatgagtttttgttcatattgtgcatcgattttttttcgcaaataacgaatgtatacgtcgatcacattggaaccaccttcaaaatcaaagtcccacgcattctgttcaatctgctgtcttgtcattacgatatttttgttgcgcataagacattccagaaccataaattcttttgcagaaagatcaatttcatttccggctcttgtaacctttcttgtgtcacgatccagaataagatctgctatttttagttgattggatgtaaattgtggctttctacgcatcatgacacggattcttgcaagcagttcttcaaatgcaaatggtttgatcaggtaatcatcggcaccaagatccagtcctttgacgcggtcttcaatgctgtcttttgctgtcagtaacagaaccggtgtatcatcttctcgtcgccttaattctcttaagatttcatatccatcctttcccggcaacatgatatcaagaataataccatcgtaggaagtcatatcgatataatccatcgcttccagaccatccccacaggcatctacactgtaatgttccttgacaagcctttttttgacaatgtttcttaaatcattctcgtcttcaacaatcagtaatctcataatgtaattattataataccaatcattttcgtgtgccagagtcctttttttcattttttgaaattactatttgttttaatctttttttaatcttccccctatatgatacatataacagcaaaaacaaaacatccaagagacggaaggagaacacgttatgaaaaaaatattagtagttttattatctctcacattaatatttgcttttacaggatgcacttcatccaatcatggagcagcagaagatgtagaaattaagacacagaaagttgtaacatcaaatacagatgacgatgatgataacatcagtaacacagaaaacacagtagagaatgcgaacgaaaaggattatgatttctcttcttatgaaaacgatatccgtaatataacaaaaagtgtaaacaatgcaaaaagatctacaaatgcatctgagaatcacgaacaattctacgctttgaaaaaacaggtagacgcagttgatgacgaactggataaacttgatgatgaatttgagtatgcttaccagatgaaagagattagcttcgagacatacaaagcgagagaacgcgcgattgaaaaactggaagatgaactggaattagcagaagaagcgctggaaaacaaatacggcattgatgattaattccatctgggctacaagaatgtggcagaactttcttaattactaaaatcgggtaggaggtagataattattttatctacctgcatacctctgcaatctgactacggcatgaattatgaacacagataaatgcgacttttttcttattcatgaaacggacacctctccttaatacattggttgttcttatcagaatgaatacactttataacaggcttttccatttgtatattgaaattctctgccacatagtcaattgctgagattatggctatataggaatctcttttacaacatcttggtccaccaatgctcccgattgcgtcaagtgccttagaagtcattttattagccagaccccaaggttcatttttaagtggagtcgctcctgagattattgatataaacattcctgtactaattccggcgccacaagcaccccagaatccacatacaccgcctggaacagcttttcctctattcatcatttcaagcagagcttccggcaaatcaatctcaccacctgcatttttatatgcggtaagaagcgctgaaccaaccataacatgatgctctggtccatgcatatgacagaatggctgcgccatcattcttcttataatttctatcggattcttagatgtttcactaagacatatgtctataattacacccattccttttgtatggcattcattacatacataatgaccctgctcacatctagttttgcttaattcctttttatggcataacacacactccatcatttcatctttttcaagatatataagtggtgctttacatataatacattcttctttcatttcctaccttcccaaagcttcaacaaatgaacttgcctctcttattacttttttgttcagagaataataatgccgcttgccttccttacgatcatttacaatcccacagtcaaccaatattttcatgtgatgtgataaagtaggctgcgtgatattgaatttatccagaatcttacatccgcatttttctccgtctgacagcatccgaacaatctccagtctatttgtatccgataatgctttacatattagtatcatatcctttgcttccattttcgctacctcacataggcaatcatctatatatcaaattaccctacgcatagatgcttgtcaatgtgtatttattcaataaagttacccggcaatcatcatagatacaaatcgaagccccaacctccgaaagactgaggctcctaacatcagttaattactcttacagttgccgaacggacacattcattttttctgcaagcatttcttgtgtaaacccatttgcacttcgcagttgttttattttttctcccattgtcatataatgcacctacttccccagaatttattttaccacgtattcttctgttcatctgtcacctgcatcgtatccgtatttaccagataaaaatctaccaattcggtctcgtaattaccgtctggatatactttttctaacaccagttcttcgcaagaattaccatccgcatccgtcttcgctccgttgtcatacagacaatatcttacatttaccgtattaccatcttttgtttcctgcgtttcactgacaataccatagacttctccttttgcattcgcagtgtaactgaaggccatattttgaagtgcattattctcctgaagataattatagaccgccagcatcgcattctgaatcgtcagaccatcatgctgtccttctgcctcataatcttctaccacatctccgttctgagtatcttctgtcactgggaaatcctctgtatccgcatccgatgattcttcgttatcttcttcagcatccattatatccgaagaatccgaagaccaccacagaccatccatactctgcataacaaatggattattggttcgatatctccgctcgcctccataatcctcctgcacggttatatacgtatatttgctgtcatgaccagtcaccgtctcctctccatccattccgaacactacactcagaccactcattccaataatcaaaagtgtaaatatcgcagcagctccaaaaatgatcattaatgccactctgtttttaccaggctgtatggataatgcctggcaattgtgtctgtacaagcttacgattccccagattaaaagaatcgccagactgattgtaataacagcaatcgatatttctgcgaaacgatatctcacttcatatcccatatcacggtttataccataccacaatccgtaaaagaaggtactatatgcaagaatcaaagtaatgatactgatccgtaccggatgctctttcttatccggcactgcctttttcagtgcttctgccatctgcactgtatctctctgctctatccactcagcaagctcagtttctgtcggatatacacatttagtatccggaatccctgcataacgcatctggctctcttgaagcccttctgtatctcctgccactactgctgtaaccactttcaggtaataatacaccttcaactgtgccggattaaatttatctatacaaatatcttccagctcctgtgtagcccgttcataattgtcaagaagtatactcatccttgccataaccaaaagcatctgattcgccacagcagggtaacgttgatattgtttctcatataaatactgtgcatactcatgtcgttcttccggtgttaaccggtaggacttctttctactctgtgccaacatcgcgattcgcataccataagccaattctaaaatcgcaatcagctggcagataaatgcaccaaatccccagatatctgttatacgatccacataggttaccaacacaatgcctagcattgccggaatcacgatcaaccattttgcccaatctgattttctcacactaacactctcctgaatagtttttctgaatatagtatattaccgcacacaccaatcaaccataatctgcggaacagtctcgtttgtacggataaaaaaataaactgagccacggctgttccaacatgaaatcagccgtggccttatttatatcatttcactcttttttgaaatagaacaacaccacagcaacaactcaaatcgacttaaaattccagactattcgcattcagcaagaaatacttcattcccatgatgacaaaaccttcatcatttctccaaggctttttgctgccatttacaatgacgatcttcttgaaagagtccgggatattacgcagagaattgaactcctgcgtctgtttttcttccgaagtcatgtcatatgcaacctggatatagtatctctggtttccttgattcaccacaaagtcaacctccaactgcttgcgaacacgtttgccctctttatccttatcgaagatatccacgacacccacatcaacattgtagccacggatcagcagctcgttataaacaatgttctccatgatatgagtaggctcctgctgtctgaaattcagacgtgcatttctcagtcccagatcagtaaagtagtatttcagatttgcaccgatatactttctgcccttaatatcgtatcggcttgccttggaaatcaaaaaggcatctgtcaaatggtcgatatgcttggagatggttttattagcataagtcatctggcgctcactggcaaaggtattggcaatctttgaagggttggtcggtgcgccgattgcagatgcaagcacatcaaccagaatcccaatctcatccacgttctgaatcttatttctttcaataacatccttcagatagacatttgcaaagatgttcttcagatagtccgctttctgtcgttcgctctggaaacttacgatctgcggcaatcctccgtagatcatgtagtcatcccaggcatcatcataatcaccgtcatagacagaataaaactctgcaaaggagagagggtagattctaatctcatcacctctgccacggaattcggtcacaatgtcgctggacaggaacttggaattacttccggtgacatacacatcaatattgctcatgcggagcaggctgttcagcacttcctcaaatcgtggcatgaactgcacttcatccaaaaggagataatacttcccgtcgtctttcatggcatccttgatgtacttgaagcataccttgggatctcttaattcctcgttctcaataccatccaatgcaatttcaataatatgatcaacatcaacgccgttctccagtaagtatctcttaaagatggtaaacagcaaaaaggatttgccacatctacgaatgccggtaatcacctttatcattccattatcttttcgctcgatcagctgctgtaggtaagcgtctcttttaatctccatcgttacactccccatttccgtgcatctgcacactttttagtaatgagattctatcacagaacgacctgaatttcaatatgtattcccattttatgtgcatctacacacttttatgtaatgttgataaatatattttcagatttttttgattgcattgtctataatcgactactccaatcgttattataagtagacaacaaaaagaagatggttccgatgtttcattaaatatgttcgttagtcttttacgcaaaggattctatctcctctgcgccctaatgcttttcggattcagttcaacaaacttgaagttgtaggtttctttactattatatctttaaaattcgttttgctttcgcattaacaaattggataatcgggcctgaaatgataactgtaatgattgtgcatatgccaaacttcccgccaagcaaaacacctattatcacaaccagaatatctaatgctattcgaacaattttaacttgccagttgttcttttctgccaaggcaaaagtaactgcttcataagagccacgaccaagtgaggcagacgcatatagtccggtcccgacagcaaacaaaataacacccagcaacatgataaagaagttgaaccatcgatatgtactgtagacatggcaggtggcaaatacatccacacaggtgctgtatacaatttgatatagcaccgtcccaatatggatttgacttttatcgtaaattaatgcaaacaaaatcatccccactgctacaacaaaagatgccataccgatgctcaagtgaaacgtttcagcgataccctgccatagcactgcgagcgtggcgccaccaaatcctgcatacagtgcaagtgtaatgccataggctgcaacaatggaacctatcacaataattatcaatttctttaataagtcccgcaatagcaatgattcccttttgtgcttatcaaacatcataattcctctattctacaaattccaatttctatttttgtttccatagcatggtgtattctttttcaccagtagcttcatccaaaccttcacattgaacaatgaacccttcatctgaatttaaagcttcacttattgattcatttgaagctttatttgtattattattccgatacttatttcttatatcgttacgaattgtttttccactaaaattacactattttttcactaaccaagtaattctattgctccaacggctgttttgtcaaattatatatcaaattgaatccaccttatcaatcggccataattttctgagtgccgcataagaaatcaaaaagtttgcgagccatccagccggtacaccaagccagacaaatgcaataccaaaacgaggggcacagattaaggcaactgacaatcttattgcaagatttaccatatttgcaataagaaatggccacatgattccaagcccacgaaggactccatctgttgccatcttgatacccatgaaaatgaaaaagtagcctagccatctcatataatcccctgatacctgataagctaaagcagttccgtcttttcctaagaataacgaagaaatttgcgtatgcaatgtctcaataactataaaagcaagaactgcaaaacataaatctaacaccagtgcagcatgatatccttttttgatacgttcgtttttctttgcaccaagattttgggaaacatacggtgaaactgcatttccaatagatataaatatcagtgaaaatacattctctactctcatcgttgccgaataacccgctagtgcctgtgtaccaaatggatttacaaccgcctgtacaatcatcatcccaattgacactgtagactgctgaagaaccgaaggtacagcaattcgaagcattgaacgtaactcctgcccgtcaaaccagctaaagtgacttttatatcggcgcatccgactaaagaaaatcaaaagtgaaaatactgcagaaattccttgtgcaataagagtcgcaagggctgcaccaaacacaccaagaccaagtccagccaccatccaaaggtccataaatatatttaaaaccgaagaaaatattaaaagacctaacggaatctttgattcgccgattgaagtgaacatcgttgaaaggatattgtacataaacagaaacggaaatcccacaaaataaactcgaaggtacagtaccgcttcatccaatatatcagcaggtgtctgtaataaactcatcattggatgggaaaagcaaaatccaaacagacccagaagtatacttagaatcaggaaactaattaatgatgtcgacacaatcgttttcattttgctataatcccgggcaccaaaataacggcttacaagaacccctgcacctacacctgcacccaatgctacacaaatgaatacattcgtaagtgcggcgcaggcaccaactgcagcaagtgcagatgagccaacaaactgaccaacaataatagaatcagccatattatatatttgttgaaaaaaactgcctagaatcataggcattgcaaaaacagtcagcgctttaagaggcacatctgtaattaaatattcatcttttgacattgtcttattctccttctatagagatttattttatatcttcaaaacacaaaatgcaaatgccaatgggaaaagtacttccaaaaccatccgaaaattaggtacgttagaagaacagggcttcatgccggtatatgaacgtcaggaaatcactgatgatctccatgaaacctgcggattcagaacggactatcaattcataacaaaacggaaaatgaaaggaattcagaaagaaagaaagtaagcggagataaaacattactatatttcgtgtatgcagataaaagtgccacaccccttgtatttacagggattgtggcacttttttaaccaaccaactgtcaaagatgagagtataaagcatatcttgtataaaaacaagttgaaagatcttttatgcattttattctcttatatcactaaaattctgtgattacttaaattctacaacaacctttctttcaccagccacattttcaaacatgcccttgatcactttctttgcattctcatctgcattatcaaggaaaccatattcatcggattcggcctttttctttgccttttcttccgcttctgcgacaacttctatcacagcttctttatcaatactcatgattgcaaaattcgtgtcatagattttcagatcactggatttgatcttgattgaatcttcgttgatcgcacaatgtgggatagtgattctgatctcatcatctgtttctttaatcttcgcctttttcacatccaggccagcagtaaccgttgtcttatactgcaccaggaatttgttcttgttgatcagcgggatattaccctttgtgcttttgaatacatctgagatgatcatcttctgggtagtcagttccgccgcatcttcaagcgtggtttccagtggaatactttcttcttttgggctggtaatatacttgtatgcggatatcgagccgacactgattacgacggcaagaattaccgcaatgattactttccatttggtcttcataggattcgcctctcttcttttgtattgccttatatcttgtgttactttatatcatatcacattatcttttcttccggatatctattccatataatccagttcgaatatcgcaatcttctctcttggatcttctcctgggaacagatccatacatacgatctcatctgtgaacatcagctcctccaccgtcatcagatacgatatatactcatctgacggataatagaagaataactgaatccgtctcggctctgcgtaataagattctaatatccttgccatcacttttcttaatatctccaccgaaaacggattaaaaaagtacatacagtctgccgtctccggtactgcaaattcttccgcattcgcaagttctatctccactcttccggacgataccgcatcttttttattctctgctgctttctcatagattcgctcatcatattcgattccgatagacttacatcttgtctgatatgacaggaagaagtctactcttccttttccacagccataatcaagcagtatattccccttacggatatatcctgcatttgccagcctttccagcacagaataaggcgtcggttcgtaagggtagcgatactggtctgcatgagtgtcatctcgtcccatcgtccgaatattcaaaagcttgtcccatcttgattcgttcttatcttctttcatctttttttatcgccttctgctctttcacttcttttatttttatcacgcttcatcctccgttttcaaccgcttttccacaagtctggtaaatgattctgcaaatcttctgtcatcttcgtctgtcctttttgacggacctttcagatgatgcttcttcttcgcatttctcgctttcttcgcgagatgtctttccatcagcatacgatcaatattctcattcgtataccatttgccattctgatggattccatatgctccctttccaagaatcatcgctgcgacaccataatcctgtgttaccacgatatcacctttatggcagagactgaccagcttaaagtccacagcatctgctccggctcctaccgtcactacctcactgtaatccgaatataacacatgattcgtatcacacagaagagttaccggaatctcatattcttttgcgatctgttcaacgatggctaccaccgggcaggcatcggcatccacatatatcttcataatacttttcctcaaatacttgttaacagaaaaacgccacacatgtgacgtttttccttatttatctattatctacagaaccttccattggcatcttcttggcaattatctatcattacgaactagaatgatctcaccttcggtctgtagcgcatatcagatactgtatacaccgttacaaatgcttccggatctttctggacaatatagttcatgagtttctgatattcactcttatctacaatcgtaataatctctctgtacttctgcatattataagcacccatcgcttcatagaatgtcgctccactgtgcagctcatgtaaaataaactgtcgtacctcttcttcgtattttgtaataatgcagactcgtctttttacattctgtccaaagatgaaatgatccagcacaataccattaaaatatgtgccaagcacacttaacactaccgcttttttatcaaagatcagagcagacgaaagtgccacacacattcctgaaattgacatagctttgcccagttcgatgtgaagatacttgttcatgatcttcgctacgatatccagtccaccggatgacgcattcatgttgaataaaatgctaagaccaatacttaccaccagaatataacataacacatccagctcattgctgttcgtcagtgattcaaaatccggaaatacatgttcaaataccgccagatacactggcagcaagatactcgtatataccgtcttcgccccaaattctttcccgcaagttacaaatccgatcagcaataagaccacattcaggatcatcgtaaccgttgacacatgcaatggtacataatgtgcgataataatcgccagtgcagatatactgctgatcgaagtctgactcggaatcaggaagaaatacactgccgcagcgataatccccactgctatcgtcatgacggcggtttcttttaacgtgtctgatgtgaaaccttttttcttttgtttgttcattttttattccccacttttgtaaatagttttatcaatatttatattatatctctaatgtatcctcgtaataattattcttttttcatcatatacatttttttccttcctgctccagtccgtatgacagtcccctcatcaaccagctttttaagtgctgattctactgaagaacttccaaggctagggcaggcaaccaatgcatcatgttttgaaaactttccaagcgtgttttccgaatatgtctttacaatatcatatatattcatcatttagtcctacaaatccttgtatcattttatctgcttcaaacacataaacttcggattgtgacagcatttcttttactaattcataattacttttccaatattgattggaaataaaataatgtgctttcagatttgtctttaaccatatgtcagcgactctatcgatatctccgttcagcaactttctaatcataacaaatattctccccaactacatcctttatgcttttctctttttttcattctatcacaagctcaccattaattatcaattttttgatattttttctttttcctgaaattaagtaaagaatcggattgcctttacatagtttccactttcaagaaaaaaaaatgtgtatttttgaaagcggttgggcgatgcagaagattttttagaattatgataatgtcaaaggggcgcagaattttttgacgtatactcgcaaaccaagctgtcactcattgcccgagtgacagcttggttacttgctatccctgataccttattctttcaaccagcgtttcctttttcagattactgcttaaaacgcaggaaagtacaatctgcaacagaccgacaaaaaaaatcataataaaaattggtacgattggaacatggtaaatattcattccaaatattccattatgctttgcataggaaaaaagtgcatagccgagcggcagaccaatgatcaaagctacgcatatggtgccaaccgtaaaaatcagtccctgtaactgcaggcataaatttaattgtttatttgtcattcccacagcctgtaatacaccatattcctgcttttatcttactctttctgaacatgaaaatacccccatataggacttttatatttcattgttctatatgagggtagcatatcaaccagacttccgggggtttttattcaattttacatgggagaataaaatccagaaaaacatctcctttccgtaccttttgttggagtcggtaacaagtagattgcactataatataaaataatattttatacttaaaaatatataacttaaaatttatacaaatatggtatgataatataaaataataaaaaaacgaggaacaacatatatgatcacaagcacatccaatgccagaatcaaacgtctggtaaatttaaaaaagaagagaaaactaagagacgaagagggcgtcttccttgtagaaggaatccgcatgttccgggaagtgccgctcgacaagttaaaagaagtctacgtatctgaatccttttacaaaaaagaaaaagataccgtaaaagaagtcctgaaagattcgaaaataagagtggaggaactgacagataccgtattctcacatgcgtcagataccaagaccccgcagggcatcctgtgcgtggtggagcagatgaatcacaaaatcagcgaactgacttcagcagagtgtccgctgatcatggtattagatcatctgcaggatccgggtaatctgggaacgattctgcgtacggcagaaggcgccggtgtaacaggaattctaatggacagggaatgcgtcgatatctacaatccgaaaacgatccgctcgaccatgggatcggtataccgtatgccgttcgtatacgtggaagatctgggtaagggaatccaggatttaaaagacaaaggtattacgacctatgcggcacatctggaaggaaagcattcctatgatgaagaggacctgacgaatccgtgtgcattcctgatcgggaatgagggaaatggactgagacgagagattgcagatatggcagactgctatatcaagatcccgatgcttggtcaggtagagtcgttgaatgccgcaatcgcctcttctgtgctgatgttcgaggctgcaagacagagaaggaaggcagattaatctcctgaaaccacttttatacagaatatttatctgtatattacataaaatgagatacaatccactcattttgcacaagaaaattgctttctttatcagagtatagtaatatagtgaacaagaaataatatatacggaaaagagaggacggcttatgaaagtgatctattggctggcgatatttattgtactgctgatcattgaaattgcgacgatgggacttaccaccatctggtttgccggaggcgcactgatcgcattcggtgcggggcttgtcggctttggactgggcgttcaggttggtacatttatcgtagtttcgctcctgcttctgcttctgacgagaccacttgcggtgaagtactttaatcaggagagacagaagacgaatacagaaagcctgatcggccagcaggcattggtgacagaagacatcgatacgataaaggccaaagggcaggtagagatccagggccaaatctggtcggcgaagacggatgagccggacggaacaatcccgaagaacacagttgttgtagtaaatggtattcagggcgtgaaactgatcgtgcgtgccagagaggagtagagtatgatttttggattgattttattagcgattattatctgcgtggtgatttcctgtgtaaagatagtcagacaggcgcaggcattggttattgaaagactgggggcatatcaggcaacatggggaaccggacttcactttaagattccgatttttgaccgtgtggcaagaagagtggatctgaaagagcaggtagtggattttgcaccgcagccggttatcacaaaagataacgtaacgatgagaattgataccgttgtattttatcagatcacggatccgaagatgttctgttatggtgtggcgaatccgatcatggcgatcgagaacctgacagccacgacacttcgtaacatcatcggtgatctggaattagatcagacgctgacatccagagagacgatcaacacgaagatgagagcatctctggatgtggcaaccgatccttggggaatcaaggtaaaccgcgtggaacttaagaacattatcccaccggcagccatccaggatgcaatggagaagcagatgaaggcagaacgtgaacgccgtgaagcaatcttacgtgcagaaggcgagaagaaatctacaatccttgtggcagaaggccacaaagagtctgcaattctggacgccgaagctgagaagcaggcggctatcctgaaagcagaagcacagaaagaagccacgatccgtgaggctgaaggtaaggcagaagccatcatgaaagtacagcaggcaaatgccgatggaattcgtttcctgaaagaagcaggagccgatgaggctgttcttaccatgaaaagtctggaagcatttgcaaaagctgctgatggaaaagcaacaaagatcatcatcccgtcagagatccagagcattgcaggtctggtaaaatctgttacagagattggcgcagacgataaaaaagaagaaaagtagacaaaagacataagataaaagtcaaagaataaaagcgaggtacaaaacaatggatttaaaaggcagaaatttcctgacactgaaagatttcacaccggaagagatcacatatctgcttgatctttccgcagaattaaaagaaaaaaagaaaaaaggaattccggttgataaatacagaggaatgaatgtggcattgatctttgaaaagaccagtaccagaacccgctgttctttcgaagtagctgctcacgatatgggtatgggaacgacttaccttgatccttcaggttcacagattgggaagaaagaaagtatcgaagatacagcaagagttctcggaagaatgtttgatggaatcgagtatcgtggatttggacaggagattgtggaggaactggccaaatatgcaggtgttccggtatggaacggactgacgaatgagtatcatccgacacagatgctggcggatatgctgacgattcgtgaacatttcggacatctgaaaggtatcaaactggtatacatgggtgatgcaagatacaatatgggcaattccctgatgatcgcatgtgccaaattaggtatgcattttgtggcatgtacgtctaagaactatttcccgaatgaggaactggtagagacttgcaaaggatatgcaaaagcgacaggagcaaccatcacactgacagaagatatcggaagcggaaccaaagatgcagacgttatctgtacggatgtatgggtatccatgggtgagccggacgaagtatgggaagaacgtatccgcgaactgtctccgtacaaggtaacaaagaaagtaatggaaaatgcaggagaacaggctatcttcttacactgcctgccggcattccatgatctgaagacgaagatcggcaaacagatccatgacaaattcggactggacgatatggaagttacagatgaagtattcgagtctccgcagtcaaaggtatttgacgaggctgagaaccgtatgcatacgatcaaggctgtcatggtggcaacacttggtgaaagagagtaggcaagatcagacagattatgaaatcagaaatattacgtttgttaaaagaaagcgatacatatatttccggacagcagttgtgcgaacagtttcaggtatccagaacggccatctggaaagtgatcgaccagcttaaaaaagaaggttatgagatagaggcggtgcgcaacaaaggctaccgccttatcgacagtccggatgttatgtcaaaagcagagattgaaagtcttgtagacacaaaatgggcaggaaaaaatgtcgtatattacgatgaaattgactcgaccaataaccgcgccaaagaagccggagataacggggctgctcacggtactttattcgtggcagatatgcaggtggcaggaaaaggccgcagaggccgtgtctggaaatcaccgtccggaagcagtatctatatgacgatcctgttgtatccggatattccgccggtaaaggcaccacagcttacgttacttatggcgatcgctgtggcagaaggtatccaggaagtgaccggacttgagacgaagatcaagtggccgaatgatatcgtggtgaacggccggaagatctgcggtattctgacggaaatgagtacggagatcgactatatcaatcatgtcgtgatcggtgccggaatcaatgtgaatcaggatacattttcggatgatattaaggcaacggcttcctcacttaagctggaactcggaaagagcgtaaagcgttccgagctgatcgcagcagtgatgaagagctttgaaaaatgctatgagattttcattgagacggaagatctgtcgggcttacaggaactttataattccatgctggtgaaccgggatcaggaggtcaaggtcctggaaccaggaaatgaatataaagcgcacgccatcggcatcaatcagactggagaactgattgtaagaacgccggatgggaaagaaaaagaaatctatgccggagaggtatcagttagaggtgtttatgggtatgtatgatgaaaaagtggtgctttgcggcgccaattcatatgaagaaaaatattatctgaatccggattttgaacagctcccggatgatgtaaagaatgaactgaagatcatgtgcgtgttgtatgtgcatgatgtaggaggaatcctgacgctggtattcgaagagaacggggaattatgctttgaagtaacctccgatgattttgacccgatgttcgatgacatcggaagccagcttaagatcaagcagctgcagagagacaagcaggatcttctgcaggcattgcagttatattataaagtattcttcctgggtgaagagataaacagcgaagagtaactataaggaaacagacaaaacaggaggagaaagatgcttcttgtaatcgatgtaggaaatacgaacattacactcggagtgtttaacaaagacgaattatttggcacattccgtatgaagacaaagcagccgagaacatcggatgaatatggaattactttacaggaactggtagaaagacacgggatcgaaagctcgaagatcaatgcagtgatccttgcatccgtagtgccggatgtgatgcattcactcggcagtgcgatcatcaaatatttcggcgtaaagccggtggttgtatctgcaggaattaagacgggaatccgtatcgtcacggagaacccgagacaggtcggcccggaccgtatcgtagatgcagtcggtgcttacaccttatatggtggaccggcgatcgtggtagacttcggaacggcaacgacatttgatgtgatcggcccggacggaacatttgaggcgggcgtgatcgcaccgggaatccgcacttcggcacagtctctctggggagaggcagatatgcttccggcaatcgagatccgtaagccgaattccattctcgcaaaagagacgatcacggcaatgcaggcaggccttgtatatggtcagatcggtcagactgaatatatcattaagcgtatgaaagaagagtccggctacccggatgcaaaggttattgcaaccggcggacttggcaagatgattgcgaatgaaacagacatgatcgatgtgtatgattcacagcttacgttaaaaggacttcggttcatttacgaaaagaataaaaaaagtaaataatctacggtgttgataatgtagactttcagagaaatgtgcagcactatatatcaagatggttccgccagtgtaagagtggggctatcttagctgatatatagtgctgtgtgtttcttgcaggaaatgaagtataattgtgagaagaatgataagtatcctggaataatcgaaaatagaagatgtttggaaattgttcagggataaccaggatagaagataatagtaattaaaattaattaacaggagtagaaagatgaaaatcgggaatgttaatctggcaaatccatatattctcgcgccgatggcgggagtaacggatctgccgttcagattgctctgtaaagagcagggagcgggacttttgtgcatggagatgatcagcgcgaaagccctgcagtataaaaataagaataccaaagcattacttgcaatccatccggaagagtatccggtgtcgttacagctctttggttccgatccaaagatcatgagcgagatggcgaaaatgatcgaagagctgccgttccagatcctggacatcaatatgggatgtccggttccgaaggtagtacggaacggcgaaggttctgcacttatgaagaatccgaagctggtacatgagatcgtatcggcagtgtcgaaagcaatcgaaaagccggtaacggtgaagatccggaaaggatttgacgatgatcatatcaatgctgtagagatcgcaaagatcattgaagatgcaggcggtgcggcagttgccgtgcacggacggacaagggaacagtattattccggtaaagcagactgggatatcatccgtcaggtcaaagaagcagtatccattccggtgataggaaatggtgatgtgatttcaggagaaaaggcacttcagatgagaagagaaaccggctgtgacggcgtgatgatcggaagaggtgcacagggcaatccatggatcttccatgaacttcaggaatatgaaagaaccggtgttgttcctccgagaccgacgccggagaaaatcaaagagacaatgctcagacatgcaagactacagattgaattcaagggagactttatcgggatcagggaaatgcgtaagcatgttgcctggtacacaaagggaatgaaaggttctgcaaaactcagggatgcgatcaaccaggtggaatcttatgaagagttggtggaacttctggacaaggcgattgtataaacagagaatctgaataatagataccgtcggaaaatgaaaagaacaggcgtaaaatagggatatacaagagacaaaaacattgacataaaacacgcatttatgtataataatgaaattgtgaaagtatctttattctatgacagattaaatattcagatagatgattcaggcataaaaatgtcagagtaatatggaacagaaaaaggagcaggagacagatggaagcaaagaaaaaattacttacttatgctggtttaaaagcactggaagacgaacttgaaaacctcaaggttgtaaaacgtagagagattgcacagaagattaaagaagcaagagaacagggagacttatcagagaacgctgagtacgatgcagcaaaagacgagcagagagacattgaagcacgtatcgaagaactggaagcaattcttaagaatgcagaagttgtagtagaagatgaagttgatttcgataagatcaacatcggatgtactgtaaaagtattcgacatcacatttgacgaagagatggaattcaaactggtcggctctacagaggcgaacagtctggaaggaaagatctctaacgaatcaccggttggtcaggctctgatgggcaaacagatcggagatgtcgtaacagtagagacacaggctggagtaatggagtacaaggtactggacatcagccgttcattataagagacaggcagatacccgtcgaagaataaccaggacacaagactcaggcctctcttacacgggaggtctgaattcagataaggaaggagaataaaaaagtggctaagcagcagaacaatggacaggaacaggacgtgaaccagttaagaaaggttcgccgtgataaattagcagaactgcagcagaatggaaaagatccgttcaagatcacaaaattcgatcagacacatcactcactggaagtgaagagtctgtatgaagcacatgaggcagaacttttaaaagatcatcatacaccagatgtagaaggtatggatgaagagcaggcaaaagaggttctgaagaaagattatgaagagagaagaagcatcatggatgccaatccaatccacgtagcaatcgcaggacgtatgatgttcaagagagttatgggtaaagcttctttctgtaacattcaggatcttcagggaagcatccaggtatatgttgcaagagatgctatcggaacagaatcttatgcagatttcaaacgttctgacatcggtgatattttcggattagaaggatttgcattcagaacaagaaccggagagatctctatccatgcagagaagatgacacttctttccaagagcttacagatccttccggagaagttccacggattaacagatacagatacacgttaccgtcagagatatgtagacctgatcatgaatccagagtcaaaagagacatttatcaaacgttctcagatcctcaaagagatccgtaacttcttagacggacgtggattcatggaagtagagactccaatgctggtaagcaacgcaggtggagcagctgcaagaccatttgagacacattacaatgctctgaacgaagatgtaaaacttcgtatttctctggaattatatctgaagagactgatcgtcggaggacttgagcgagtatacgagatcggacgagtattccgtaacgaaggtgtagacacacgtcacaacccggaatttacactgatggaattataccaggcatatacagactatgaaggaatgatggaactgacagagagcatgttccgttaccttgcagaaaaggtatgtggaagtgcaatgatcagctacaacggaacagtcatcgatatggcaaaaccattcgaaagaatttccatgatcgatgctgttaagaaatacgcaggtgttgacttctcagaagttaagacagacgaagaagcaaaagcattagcagacaagcatcacgtagaatacgaagagcgccacaagaagggggatatcctgaacctgttctttgatgagttctgtgaagagaagatgatccagcctacattcgtaacagatcatccgattgagatctcaccactgacaaagaagaatccggaagatccgaactatgtagagcgttttgagttatatgtatacggtcgtgagatgtgtaacgcatactcagagttaaatgacccaatcgaccagagagagcgtttcgcagcacaggaagaagcatttgcagcaggtgatgaagaagccaaccacacagatgaagacttcctgaacgcactggagatcggtatgccgccaacaggtggaatcggatacggaatcgacagactggtaatgttactgacagatgcacaggctattcgtgatgtattattattcccgacaatgaagaccctcggtggtgtaaaatccgaaaatggtgtaagttctaaagaggtttctacaccaaattcagagcctgagaaaattgatttttctaaggtaaagattgagcctttatttgaggaagcagttgattttgatacattcagcaaatcagatttccgtgcagtaaaggttaaagaatgtgttgcagtaccgaagtcaaagaaactgttacagttcactcttgatgacggaacaggcacagacagaaccattttaagcggtattcacgcttattatgagccggaagaactggttggaaagactcttatcgctatcacaaatcttccaccgagagctatgatgggcattgactcttgcggtatgctcctcagtgctattcacgaagaagaaggcgaagaaaagcttcatcttctgatggttgatgaccacattccggcaggtgcaaagctctactaagaagtaccgttttaccctataaaacgggatgtacttcatttgtgaaaaagctctgaaaatacacaaatacaccaaatttacaccaaatggtgcttgaaacggtgcagagccttaaaaatcgcataattttcaagatatatgggcagttccattgcggaattgcccattttttcgttataaaccgatgtttgcacagaagatggataacagttaagatgttcctgacgatacgatattgtatgagcttaaaattggaggaacaagaaatgtatatgcgattgacacagagagaaaaagagatggcagatatgtttgagcaaatgagcaaggatgaacaggaaataatgattgagtttgcaaaaagattacgaacggaagaccctaaagaattggtaaaagaaataaatcagcgattagatatagatgatgagtaattggttgtatattgccctttgagagaggagaaatctttccttaatgggcttttttatttttactgatattcgcaaactacaagaaaaatccgaaacttcatatactttaatcacagaggaagtggaggttttgatatgagtaacagcttagcggcagtacatccggaattgattatcgaatggtcggataggaatttaccgctgacaccggacagcgtgactttcggctcgaataagaaagtatggtggaaaggtgcttgcggtcacgaatgggaaacaagtataaaggctcgttccagtggggagaaatgccccatatgctccggtgcgagagtgattgaaggaattaacgatttaaatacattgaagccggaattggcttcggagtggtcagaggaaaatgaaatcaaaccgacagaggtatctatcggctcacacaagaaagtgatatggaaatgtaaattaggacacgaatggatagccactgtaaagagcagaaccatcaatagaacaggttgcccgtactgctcccataacaaagtgcttgcaggatttaatgaccttgcaacagtattgccggaagtagcagcagaatggtcggacaaaaatgaaaagaagcctaacgaagttacggcatttgcaaacagcaaggcttggtggaagtgcaatacctgcggttatgaatggaatacgcttatctccacacgctcaggtggcagtaaatgtccctgttgcagtggctatacatttataaaaggtaagaatgacctaaaaagtacacacccacagatagccaaagaatggtcagagaaaaactatcctctgcaatcggatgaagtcaatgcaaagtcgaggaaaaatgtatggtggtattgcagaaaatgtggaaacgagtggaaatcagttatcaatgcccgtgtgaaaggaacggtttgccctgtctgtgcagagcgagaagtgcttgccggatacaatgaccttgcaacaactgatagagaattacttgttgagtgggattatgaattaaacaagttaaaaccgacagaagtttcaagaaattcggcaaagagagcgtggtggaaatgcagatacggtcattcttggagtatgaagataaacgagcgtactgttcttggaaaagggtgcaggatgtgtgagcagaagtatatgtcgttattcccggctcttgcaatcagttattattccaatttgaaaggattgaaagttgaacttggctctgataggttattcggcattccacttgatgtatatatcccactggagcaggttgccattcaagtgaatacggactcggagaagatagatatactaaaggaacatctttgtaaacaacggggaatcaaactcattaagttgccgatgaagccaaacgaagcggaaaacgtttatgcacagcgtatcaaagcagcatttcagagcgtacatatatttatatcttccgacacacaagaagatgtcaggataataaggaaaacatttgagaactggaggagcagcagatgagagaaaagaaatatcatatttatctaaccgatgacgagcaaagcagagtgatacagtcgcttatcaatctgaaaaataacttgatagcacaaggcagatataccgatgcagtagatgatgttcttatgaaagtgttgtctgcaaggaaaaggaagctgaaaatcaaataattttaagcgtttatgccgtctgtttttaaccgaaacagacggctttttttgttttcaaaaatttttttgaaaaatttttcggtaaaacaacgattttgggtgtccaaaatgaagccctttgtgcaatgagtgaaggggttaattcctgatgatgaaaatggaaaccttttcactcgttttttgacaactgaatatacaggtcgctaagactttaattctgatgatagccactttagcaggtacgccgtgatttctgtatttcagaatagcgagaactccggctatgagtatcaggttgcccctgatatggcgatgacagtcagaatgataatgatacttctctacggagctggcggagtacccggcagaggttagaatcctatgatacagataagcagtctgttccttagtgacttcccataagcattttgcttggcaaggggtgttgagaacaaatattgctatgaccgattaggaaatgagtcggtcaggtacatagccataatgcggtggctatgaatttttagaaaggagggcaaaaagaagtgtcaaactgcaaaacgatttccgtatgtaaccagaaaggcggagtcggaaagaccaccacaacagttaatctcggagtcgggcttgcaatgcagggcaagaaagtattgctcatagacgcagacccgcagggcgatttaacgacttgtcttggttggcaggatacagacggtttgggtatcacgcttgcaacgaaactcacagatgtaatcaatgaaacgatgacagaccctatggttggtatcctgcatcacgaagaaggtgttgaccttgttccggcaaaccttgagctttcagcaatggagtttaaccttatgaacgcaatgagcagagaaactacactcaagaactatctgagtcaagtgaagaacagatatgattatgtaattatagactgtatgccttcacttggtatgattactctcaatgctttatcggcggcagacagtgttattattccggttcaggctcagtatttgcctgcaaagggtatgacacagcttgtgcagaccatttcaaaagtaaagaagtatatcaatccggatattaagatagacggtatgctgcttactttggtggatagccgaacaaatcttgcaaagagtacggtggaagcactcagggcaaacttcggtaatcagataagaatgtatcgaacacaaatcccgattgccgtaaaagccgctgaaacttcttccaaaggcaagagcatttatgcttatgagccaaacagcacagtgtctaaggcatacgctgaatttacaaaggaggtgttagccgatggcaggaagaaagagcgacttcactctcacgaagctcgatgatttatttaccacgcaggcacagcgagatgaagaacagctttcaaaaatccgagatattccattggagctgattgatgattttcccgaccacccgtttaaggtcagggacgatgaagatatgatgcagcttgtggagagtgttaaggaaagaggggttattactccggcaacggtaaggcagaaagaggacggcagatatgaacttgtttcaggacacagacgaaagcgagcttgtgaactggcaggatttgaaaccctgagaagtgagattgtagacctgaacagagatgaagcgaccattttaatggtagagagtaattttcagaggtcagagatattgccaagtgaaaaagcctttgcctataaaatgcgtttggaagcaatgaaaagacaagcaggcagaccagcaaaaaataattccccagtggggaacaatttagagtttgcaaagtcaagcgatgaacttgctgataagacgggcgaaagtaaaaatcaaatttaccgatatgttcgtctgacaaaccttgttcctgaactgcttgaatttgttgacgagggacgtattaaaatgcgtcctgccgtagaactttcttatctcgatgaagattgccagcgtgatgtggttgacgaaatcgacttgaatgacgctaccccgtcacacgaccagacaatccgtatgcgaaagttattcaacgagggcaaccttacaacagaagcaatccacgctgttatgtctgaggaaaagccgaaccaaaaggaaaaaatcgtgttgaggggcgacagagtaagacagcttatcccgaaaaacattcccgtcagtcagacggaggattttgtctgcaaagcattggagcattacaacaagtttttgcgtaatcgtgcagaacgtgacagcagatagcctgttttacagttcccctttctcacattctaaccccttagttatacttctacctaccgaaaatgatatatattatctcacttgaatataactatctcaaagtatatgtctatctctaaggggaaatcgcacagtatgaacggactggaggtgtatggtaaaatgaaaaattaacgaaaaatccgcatttgtttttcggcaggtaaatcttgtcgtaagagaaaatccacaaaggcacattgtagagatacggtgtgtttttcaatttttacaggaggaaacgcaatgataaagtcaaaattcaaaagagtcacgtcgcttttcttggcgacccttatgtgtgtgaccacttttgcaggcattggctcgacaacagcatatgctgcttcgggagaaaaagctgatgtctatatggtcgatttccctcgtgatggcgatgctaattacgatggggtatggggacacagcaatttgaccttgaaaaatggttggcataccggacgttccaattttaccaatcttaaggctattggctcatactcaggcaatgttgcttattgtattgagccgggaatttcgctcaaggttggtcagacaatgaataaatatgacgaaaattattttaataaccttgcagccaatggggttatttccggagatgaaatccgtcttttcgttggtcgtattttacagtatggctatcgtgggacaatctcgacatcttggaggtcacagaatgaagcagcagcaaacagcattgcacaggcttatgccacacagcttcttatctgggaaactgttatcggagagcgtgatgcgaacttcaatcatgtagcagccagtggttgcagcaatgtgaaagatgtcatcaatgcaaagcatccgctccgcaataagattttcagttattacaacagtatggtgcagagtgtacagaaccatgcgaccataccaagcttttgtaataaatcgtccggttcggcaaagacaatagaacttgagtggaacggaagcaagtacacagctactctgacagattccaataatgtgctgtccaaatataatttcaaggcaagtatcagtggagtgagcttttcagtgaatggtaacaaacttactgtttctatggatactgcaccgagtaaggaatttaccattaccgcaacgaagaaaaatgcagtccgcagagggaagtttcaatacaaggtatccgcacgaacctaatggaattaaagaccctgaatattctatccagtgtggagttcaggaattgaaagcggctcttacttcggcagaagcggaaagtccgatagatatggagcatatcaaacttgccttgcaaggctacaacttcggtaatgggtatatttcttgggcaaaaacaaagtatggcggttattcttatgccaatgcagtggagttttccactcagcaggcacaaaggcttggttgggacagttatggagatacccaatatccggctcacgttctgagatactatccgtatgggcgagcctttactgccggaggtaatcaggcgattgttgaggttgccttgacacagctaggcaatcagggcggacaaccttactggagctggtacggctttaatagtcgagtggaatggtgtgcctgcttcgtatcttggtgtgctgaccaatgcgggtatattgaaagcggacttgttccgaaatttgcaggttgcgtggatggtgcaaactggtttaagtcaaatggaaaatggcaagaccgcacttatgaaccaaaggtaggagatattatcttctttgattgggaaggcgacggtacaacagaccacgttggtatcgtagagaagtgtgagaatggcactgtttatactgtagagggtaactcaggcgatgcctgcaagcaaagacagtacgcagtcggaagcagtaatatctatggatacggtattccggcatattaaaaattccagacggtgtctggaaaattgaaaagatggctgctcagttgagtagccatcgggtacattatgagaaatcagttgtttctctgttattcaggaaaatatggtgtgtgtgataagtgaagctgaaaagcatatcggcattttctttgctgccgtctaaaaaggaaatatcatcggcaaggataaaaagaattgctaacagcttcttgatatatccagtgtagcaggcataatctacatagatgttggcgatatatccctcggcaaattctatcaggtcagcgtcaatttcaaagctattggatagttcgtaaacggttttgataaatttatccttgtcagcaattcgctctttacttggaacacttctgcggttcttctgtataaatttaaaaaaatcatcagcttccgtaaagtcgggagtgactgagctgtcagttcccaaatctgttttgtaatcctcaaatttctctttttcaaaccgattactgaatattatcttttgttcgtccattccttttacccctaagtttattctatggagattgtttaacttggctcttgggttgtgatttgtctttcgccattaacaatcgtgaattactacttttatagtataacataaaaatagttgggaatcatcactaatagttggtttgacttcctttgggtgcgtgtgatttgaaatcgacttaacctatactattagttatggaaacacactaagggaggtgatgtgatgaagctcgatacaatcggcaagaatataagaaagttccgacttgcaaggaaattacgccaagaagatttggctgagaaaacagatttgacaacaaattatattggtatggttgagcgtggagagaaaattccgtcactcgaaactttcataaagatagtaaatgctttaggtgtatcatcggatatggttcttactgatgtcctggaaacgggatatacagtcaagaactctatgctgaatgagaagcttgaaaaacttgctcctgaagatagaaacagaatttatgaagttatagatacacttgtgaagcaatcaaagcaaatacttccataaaacacagaagttcgtcctaatcgacgagctttctttttttgctttgaatcactttgccgttaggtgttagtaaaaaatgacacctaatcaatgacgagttgcgaataaacgtctgtatcttgaaaaaatagattatttatggtatgatgttaatcgagtaactgtaaccagaagaagcggagaatacaaaggagagttacagatgagaataagctataataaacttcaaaaacttatgattgataatcagatgaaaagacaggatttaatgcgtgcagcagaaatttcatcatctgttgcgacgaagttgaataagaacgaaacagtatctcttgatgtcctgatgagaatttgtaaagtgttccattgcgatattggagatatatgtgaagttatattagacgaatagaaggaacattgcttccagtcaaaaaataaaactggatattaaaagatttaatgtccaccaaaagggtgaattagatggtagaagaaacatatagtgcaggattgatttcccaatcattctggtttgttgaaatgaagaaggtcatcaagctgattgacgatggaaagtccgaagaagaaattaaaaaaatgtgtatagacgaaaatctttttggtgcggcaaaagagtatcgagccaaaagaatatatggatacatttggaatagagccaaaagattggataagacactgattgacttattttgtacttctgacttggcaacccaaaaggtaatcaatttgattgccattctcaggtcagaccgattgttctttgaatttatgtttgaagtgtaccgtgaaaaaaatatacttggtattccagtaatcgaagacgcagatgtaaatatttttttcaagaataaagaaattcaaagtgaaaatattgcagcttggacggatggtacaaaacgcaggcttcgctcaatatattttaactatttgactgatgcaaaccttttaacggctgttgagaagaagaaaaccataacgccaccgattcttgatattgctttagagcgttatcttgaagcgtgtggagagagtgcaatgattaaagcaattacgggggtggactaaatgatgtcgcttgatgaacgattggataaagcagaagaaatgatacaaaaaccctcgtttagagagaacaaagggttaggtaatgaagtcggatactatatctttgattatccggctgaaaaagaattgtatatccgtgagaggatagaatacatcaagaaaaaaagtgaaaattcagatgatgatttcaaagttgtagtgtttgacctttacgacattatgattgatattcttatcagaaaaggatatttagaaaagtgttatcagtttgaaaagacaaaaggctttgagagagtatcaaaatccatcagcaatatgctgaggataacatcatcagacagtctgatagtgaatcatatcagggataatacgccggagaaagcggttgtgtttattactggtattggaaagtgctatccgatattgcgttcacatacggtactgaataatttacatcaggtcatagataatgttccggtagtgctgttttatccgggcaattatgacggtcaggaactggtactgtttggagagataaaggacgataactattacagagcatttaagctcgtggattaagaggagagggaatatgattatcaagaatatgttttcaaagcctattgacagagatattaagggcgtaatcaaagttggacaggatgatgatgcaaatattaagcaggagcttgaagaatatgttgtgacaagagaacttcagaagcatttttctgatttctttgcaagctacaagagaggaattaccggaaatacagacaagatgggcgtgtggatttctggcttctttggaagtggtaaatctcacttcctgaagattttatcctatctccttgaaaataaagaagttggtggtaagaaagcgattgattacttcgtagatgataataaaatttcggaccagatggtacttgcagatatgaaactggcaggtacgattccgacggatgttgtccttttcaatattgactctaaaagtgaagtgaatggtaagcagtctaaggttgccattgtttccgtattgcagaatgtgttcaatgaaatgcaaggatttagtggttctaatccgttccttgcggatttggaacgcaaattgacagaagaaggaaagtacaatttattcaaagaaaaatttgaagatagctttggttctgcttgggaggaatcacgcagcgactttgatttcattcaggacgatgtggtagaagttcttgatgagattggatttatgagcatagaagccggtagaaactggtgtgagaaagctaccggagaatatacatataaggttgaggatttcgccaaacttgttaaaaaatatcttgataaaaaagagagcaatcatcatatcgtattcctgattgatgagattggacagtacataggcgatgattctaagcttatgctgaatcttcagactgtaacagaagatttaggtactgcctgcggcggtaaggcttggattatcgtaacaagtcagcaggatattgattcgattacaaaaacaaaaggaaatgacttctcgaaaattcagggacgttttgataccagactttctctttcatctgccaatgtagatgaggttattaaaaagagaatccttgaaaagaacgaagcgggaaaacagacacttacactgctttatgatgataaggcgacagtcattaagaacctgattttgttcaatgatggtgttgaaaagaaattatattcagacagagaaaattttgcggacatctatccgtttattccatatcagtttaatttacttggaagtgttctgacttccattcgtactcacggtgcatctggtaagcatctggcagaaggcgagcgttctatgcttgcattgtttaaagaatctgccgtaaaagttatgaacgatgagccgggaacgattgtgccatttaatatgttctatgacgcccttgagcaattccttgaccattctcacaagggtgttatttcccgtgctttagataatgagtatctgaatccaaatcacgaaaaagaatgttttgatgtcaatgtactgaaaacactctttatgattaagtacgttaaggaaatcaaagcaaatattgagaatatcacaagtcttatggtatcgaatgtaaatgatgaccgtatggcacttgcacagcaggtagaggacgcattaaaacgccttgttcgtcagactttggttcagaagaacggggatatttatgtattcctgacagatgaggagcaggaaatcaacagagcgattgaatcacagaacgtagattccggagaagtcattgccaaagtatccgagatgatttttgacggtctttatgatgaaaagaagtatcgctatccggcattcaacggaagatatgcgtttgcttttaatcaggttgttgatgataaaccatataaggcaaatcagaataatgatataacattgaaaattcttactccgaacagcgatgaacgagcagatgaaacaacaatgagaattctgtccggtcagtcaagttgcgtacttgtagtattgcctgatgacagaacatttcttgatgaaatccgttctgctttgcagatagaaaaatttatccgctttgatgctacaaatgcagttacacagtttgaaagcattaaggaagccaagaaagtggaaatgcgtgagagaaacggtgctgcaaagttgttcctttcagaaagtttaaagaatgcagaaatctatgtgaatggagataaaattcagagcggagcaaaggaaattgcatccaagataaatgatgcactcggcaagttggtttcaactgtttatcataagttgtcttatattgatacggcaatgagtgagtcagacattcgcacattatttaagaataatggacagcagcttactcttgcaggtacaaatactgcaaagaatgaattggctttgcacgatgtgaatgactatattgctttgaacacacagcgtcacatgaaaacttctatgaagtccattctggaacgtttcttgaaagcaccgtatggttttgtagaagctgatgtacagtggcttgtcgctaagttgttcaaagatggcgaaattgcaatgttcgttaataacgatgcagttacattgctttcaaagactccggaagaaattatccgttatctgacacgcaaagagtttaatgaaaagttgatgacagagaagcgtgtaaaagcgaatgaaaagcagaagaaatctgtccgtacagtaatgaaagaactctttaatgttacttcggcaagtgatgatgacgatgcgattatgagaagttttcttggttatgcattaaatctgaagaatgaccttgaaaaattggatattcactatgcgacacagcctgcatatccgggcaaacagcttattgcttccggtaaaaagctgatggctgatgtcctgcaaatgaaatattccaatgagttctttgcaggtattgacaataaaaaagatgatttcctcgattttgctgaggattatgagcctgttaagaagttctttgcgggagaacagaagggcatatttgataaagctctgaaactgatgaagatttatgatgacagtaagacatttattgtaaatagtgagattgaagcagttgttgcggacattaagtctattttgaagaaatctgttccttattcagaaatctttaaattaccggagttactggacacgtttatcaatctttacagcaaactccttaacgaaatgcagaagccgatagataatgccattcaggaagcaagacagcgtgtctttgaagaactgcaagacaaaaaatgccacgataaattggctgataaatatgtaaatctattcagagaaatcagtgacaaggcaatgagctgtaacaatgtggctacactgcaaaatatcaaagtggaagcagacgcactcaaagtccgttgcttaaatgagattgaaaaagaagaagcgaaaatcattgcagcagaacagcctgcccatgttgcagaaaccggaaactatggcggagaaacgattgctccggctacacctgctccaaaggtaaagagaaagaaaacggtcagcattaaatctatcaacaatgcgacaacttggcagcttgagaatgaagcagatgttaagaagtatattgcagaacttgagaagaaactgatgaatacgttggaagaagatacgattatcaatattgagttctaaggaggacaatttggaggaaaaagtaattgaactgataaaaaaggatatagcacgctgtgaacagcagacagttaatgagggttcatatcaactgtatcaggcattgatgggaaagtataatggattgtttccgggattttctgacgatattccgaaatcaggaaaggtatcgacaggaggagcttttaactatcgcccagaattaaatgcaattaaagaagtattggaacttaaactgataacagagcaatctaaagacccattatttgagtttaaaaatatgttttctcaggatattgatagtctgaaaagggtgattgatattgagtctgatgtttcggaagaagagaagaaaaggttatattggtctgttactgcaaaatatcatccttatgttccaaaacttggagaaggtttatattcttattttgctgaacaaggcttttacgatgaagtggaaggttcttctttggattataacctgcaacagatatataacaaattgtgtgcatttaaggctttaaattatccaggattagatgcagttgcaatgagcagtcctaatacagttgttaatatcacaaataacaacgaaaataagaacactatgaatgtaacatttgattctgtcagaaagacgattgactcaatgacatcactgccggaagaggatatagaggaaatcaaaaataagatttcggcgttggaagaaattgttaattcaaaagaaagcaagagtaagaagtggtctaaagcaaaagacattatcaaatgggtagcagataagggtgtcgatgtcggcattgcattactgccattgattttgaaaatcgggtaatggaggagcaagatgaacaaaacagcaataagaaaatttgcagagtgggcgagagaaaagctcattgaagatattaaatataaagccggaacagttggtattacagcgaatggaatcgtagagaaattaccgcagtcaacaagtgatacgtatttctatgatgtaggtacaaaggattatacgaaaatctccggtattgaaattaagcagagagatgctcttgtaaaagcaattcagacaaaagaacgcagctataaaagttatcaggaagcgtttgaaaatgtgattgaagaagtagcatatacttggttcaaccgtttgattgcgattcgttttatggaagttaatgattatttgccttctggtgttcgtgtgctttcctctgagaacaaggcgaagaaagagcctgatttagtaacgacaccgtttgataccgatttggaatttacatcttatgagcaggacagaattatccagttaaaagacgataataaactggatgaattgttccgtatgctttttattaagcagtgtaataagcttcacgatattttaccggagctgtttgaaaagacagatgattattcggaattacttcttacaatttcgtttacagacccagagggaattattcatcatcttatcaacgatattgaagatgttgacttccgtattaacgatgaaatgtacactgatgacggaaaaataaaggctgatggtcaggttgaaattatcggttggctgtatcagtattatatttcaaagaaacatgacgagattgtaaatatctataaaggaacagtaaagaaagcggatattccggcagcaacacagttgtttacgacagattgggttgttcgttatatggtggacaactctttgggaagatattggattgaaaggaatccacagagtaagttggctgaaaagctggaatttttcgtcacacctaaaaacggggaaatccagtttgttgatgaaaaaatcaatccgactgatttgaccttttttgacccttgcatgggtagtggacatattttggtatatgcgtttgatgtgcttatggaaatctaccgtgaagtgggatattcagacagagatgcggcattaagcattgttgaaaataaccttttcggtatggatattgataagcgtgcatatcagttggcatattttgcagtaatgatgaaggcacgcagttataatcgccgtgcattgacaaaaggtatatctaataagcttgcagttgttgaggaaagtaactctattgataaatttgcgtgtaatggcttaacaacggatagtgagcagaataaaattggcgaatatttggtagaagcatataaagacgcacaggaaatcggaacgttacagacgattgagaagaaagattacaaggaatttgtagaatatttaaacaatgtcgagagcagtgcaggacagatagaccttttttcaacagcttggctgaatgatacacttccacagatggtacagcttgcaaaacaggctgaaattatgagtaacaagtatgcagttgtttgtaccaatccgccatatatgaataagttggaaggacagttaaagaaatttgttgttgataattataaggcatattccggtgacttgtttagcgtgtttatttaccgtaactttgattactgcaaaatagatggatactctgcttttatgacaccgtttgtttggctgtttataaagacctatgaagctttgagaacatatatcattgattcaaaggcgattactaccttagtgcagatggaatactctgcctttgaagaagcaacagtgccaatatgttcatttgttttaaagaatggtaaagcaacagagaaagcgttgtgtttcaaactgtctgattttaaaggtggaatggcagttcagaagcaaaaagttttagaagcaattgataacaaggggtgtggatatttttatgaagccgttcaatcagatttcaataaaatacctggaactacgatagcttattggataagcaaaaatatgttaggagcttacgaagcaggaaaaaatataggagaaattgcgtttcccaaaaccggaatgactacgggggataataaccgcttccttagaatgtggtttgaggttaatataaataatgcaaaatttgatgtagaatctgcaaaagaggctcagtgttcagaaaaaaaatggtttccttactgtaaaggtggtggatttagacgttggtatggctataacgagtatttggtaaattggtttaatgatggatatgaaataaagaataatattaaagccaatggtttaaaagcagcgagcgttagaagtgaaaatatgtattttaaacctttgattacttggtctgccgtaacctctggattgttttcgtgtagatattgttttggaggagccttgtttgattctggtggctcaagtatttccgttccacaaaacgcatactatttactttcggtattaaatggaaaaatcggacaatacgttttggatataagtaatgcaactatcaattaccaaccaggagatattgcaggaataccaatcatatttgagaaagtcgagcaagtagagtcaaatgctcaattaaatattcaaatttcaaaaacagattgggattcttttgaaacatcttgggattttaaaaagaatccgttagtttctggggctgctaataaaatatcaacagcttttgaaatgtggtcaaaagaatgtgctgaacgtttcaaccagcttaaagcaaatgaagaggaacttaatcgcatttttattgatatttatggattgcaggacgaattgacaccagaagtagaagataaagatgtcactgttcgcaaagctgatttacagagagatattaagagcttaatctcttatgcagttggttgtatgtttggacgttattctcttgatgaagatggacttgcttatgcaggtggagaatgggataacagcaaatatgatacttttattccggatgaggataactgtattccgattacggacgaggaatattttgaagatgatattgtcggtctgttttgtgcttggctgaaaaaggtatatggagaagatacgcttgaagaaaatcttgattttattgcgaatgctctgggcaataaaggtaagacaagccgtgaagtaatccgaaattatttcttgacagattttatcaaagaccatattaagacctatcagaagcgtcctatttactggctttttgacagtggtaagcagaatgggtttaaggctcttgtttatatgcaccgctggaacgcagacaccattggtaatgttcgagttgagtacctgcatcgtattcagcgtgtgtatgaaaaagagattacccgtatgcaggaaatcatcgacaatagccacgataacaaggaaatttccaatgctacaaagcgtaaagaaaagctccagaaacagattaaggaaaccaaagattatgatgctaaaattgcccatttggctctttcccgtatcgacatcgaccttgatgatggtgtaaaagtcaattacgaaaaagtccagaccgctgatggaaagaaaatgcagattttagcgaagatttgaggtgttatatggaactggaatatgggttggtagaaaatgctcttgattcacttcgggaagcaatgaattattacaacgagggcgatgaagaagataatgctaatcaatataaatttagtattcttctgtctgctcattgtgttgaattactacttaaagaaatacttagaagaaatcatccggcattgttatttgaaaatattgattccgtaaaagatttacaagatgatgataatcaaacagtaggatataaaaacgcaattcaaagagtgaaaaaattatgtggtgttgatttaaaacaatatgaaacatatattgatgagcttggtcgtgttagaaatcaaattcaacattataaatgttccataaatggagaatatcataagcaacttatggcaaaaactttttctgcgattgaatttattttcagagatattttgggactaaaattcgaggattatgaaaatattattgaaccagccgatatagattttttacacgaagatattgcagctaataaagcaagaaaaaaagatattgttaaggattttgaaaaaagtgaaaataggttcaggatagaatatgtagatggtaaatacttggaggtatgttgccctcactgcggaacagaaagccttgctttagaaagcaatggaaaaataaagtgtaagttttgtggagaagagtttgacaattattctgagcttcataaggcagatagaaactgcataacgcaatatggtattcttagagaatttggaagaagaagacatttacttcattcaagaatttttgaatgccctcaatgtgaaaatgattcgatgataatgttaccaaatagaaaatggttatgccttgtgtgtggctatgaagtagaaacgtcatgttattgtgatgaatgtggagatgaaatgccttatatagacggaatatgtacaactgcaatttctgatacagacactgaagattttaaaacgctatgtccacagtgtgcaaaaaaatacgctgaagatgaagcatatataggctatgaacttagttgaagaaagtgtgtatcagtaaggaaaagagatggacagaaaagttaaggagtaatggttatggcaggaaaagatgataattttaaagtccttaagaaaaaagaaatatatgagttcttggaaggaaacggaccgtttctggtaacgcataatggtacagagtatggattaccatattatacgggcacacaactgagttcattatgtactgagtttggtttaacagaagttgttggtggaagcagatggtgctatgtagaagaattgcttgattatgccattgagcaacagcgttgcgatgaactgtttagatttctatttagcgaaaagcagtttactaatttacaggacattgccgatatgaatgaagttgatgatgtttaccgccaaattgtgaaaaaggcgatagaacacatcaatcatagcattcgattgtcccgtaaggaacttgttcttataaatggtcactttatgattgttgaagttggaaaaactcctgttatagaaaccccaaagctaaatgtacgctcgattccttatgttcagggacttagagaacgatgcaatgatgattttaactcaggaaattatgacagtgtcataacaaaatcaagaacaacaatggaagaggtacttgttcaattattggaggaaaacaatgttgagcaaatctcaaagggtgatttgcttaaattatacaatcaggtaaaaacattgtttaatatgcagcagagaaatgaaaatgacaaacgagttaataatatgctaagcggattagaaaaaatagttcaatccattgcagaaatgcgaaatgccaacagtgatgctcacggagttggaagccgcagaatagctattagagaatgcgaagcaagattggttatgaactctgcaatcacattttgtgaatatatgatatcggttcatgataaataagagtttttaggagatattatggcagaactaaacttaaaacagattacagacaaattaaatagtgagtttgcaagtgatgtccgtaaacttgtgttttggtatgatgctaatgcggagtttcaggaggatattgacagcattgaactggaaaatgcaaaggttctgcatcttgagccggacaaccagttctatatcaaatacttcttggaacgagaggatacgacaaccaattatcttgtgtacgctccttttgcaaaaccgaacataagggacaaccatcttgcagatacaattcgatattccaaagaattctttgctgaccgtgcttccttgctcacgcttgatttggggattgatgaacggtacaagcctgtcattcagcattatattaaattctttgcgaataaagacagaacgcagaaattctatgatttggaaatagagaatttcaatagaagtacgatagaagttgctctgatgagcgttctttgcaaggataagacagcttcttttgaagaagtgctgcgttcaattttgacagacgatggcttgcaggataacaaatatctgtctgagtttgaaaagtatgatttgctttctgcattctggcagcaggcagatgtggcatttggatataacgacccgaagccgacgcttgaaaaactcgttatcacgatgtttattacttatgcggctaagagtattcatacggatatgccacaggcttggaaaccatttatttcttataaatttggtaatatcattgcatttatggataatctgatgaacagctatctgtatggtactcgttttgataagatttcagagattatctataatgcaatcaacggtaaaaattatcttgagaagatggaagtggaaacacttgtagattgtaatatttttgcaggtgttgatgaacttctgattagttggattatcggcagacttgagaatgaagatataggagcaaagctgaatggaaagacgattccggagctttgtgtagaacgcaggaagcaacattttggaaagaacttccgcaatgagtattttattcttcagaatgcctttgatatgattgctgaaggtaagtatcagccagtcagcggtatcaaaaacttggttaaggaatatacggagtcaacttataagattgaccgttattatagatacttttattttcactttgataaattggaagataccacacagtttgaaaaaatcagggaactggttgagaatatctatacgaatgagtatctgaatcggattacagtgaactggaacaatgagcttgcagacgcagatggagaaacaggacttacgttgcagagagatttctttgcaaggcacatcaattactcaaaggatagagtggtagttattatatccgatgcactccgctatgaggttgcatatacgttgtttgaaaaaatgcaggcagatgagaagtgcaatgcttctatcggagcaatgcaaggcgttcttccatcttatacaccgttaggtatggcttccctgcttccgcataagacgattgagtacagtccgtcttatgatgtactggtagacggaaaagcgtgcagttccacggagcaaagggaatctattctgaaagagtataaagtaaacagtaaatgtattcagttcgattcaatgaaaaccatgaagcaggcagaacttcgttctatctttaccggacaggacgttgtgtatatttatcataatcagatagatgcccgtggagataaagcagtttctgagaatgaagtctttaccgcttgcgaagaagcaatcgaagaaatttatactttgataaagagaattgcatcgcaggcaaatacctatcattttattgtgacggcagaccacggattcatttataagagagataaaattcagccaacagataagattgccggagctgcttcaaaatcaaacagcgttggacagcgttattccacatctgccgaagaaatcaaggcagacggtgtttgtcatacaacagttggtaaggtacttggcaatgatgatgagcgtattgtatcgttccctcttgcgtcagatattttcaaggtggcaggagcaggacaaaactatgttcatggcggctgctctccgcaggaaatgcttgtaccaatgattgatgtgaaagtagataagggcaaaaaggaaacaagtcttgcagagattgctcttgtaagcctgacttcaaagattacaaaccttattacgacattggattttgttcagacagaaccagtaagcgatgttgtaaaagaaacaagctaccgagtatatttcatttctgataataacgagaagatttctaatgagaatattgttattgcagataagaaagataaagatacgacgaagcgtatgttcagactccgctttaactttaagaacaagaaatacgataaatcacagaaatactacttggttgcttatgacgataagaatgatatagaagttcttcgtcacgagattattatggatattgcatttgccgatgattttggattcttcgggtaatatctgaaaagggggtatcgccttatgagaagatggggcttttctgatgccttagcctttgcagttgcgatgactgttcgggatatgagcagagagaaagaaaaaagactgattaagacacagaagttttatcaggaatgttatgaaagaattgccaatgacagcgaacaggcatttaatattgtatcaaaggttgtaaaaaaggcgtcacgcagatatattccgaatgagatagcttcgggcagtacctaccttgcgttatatgcgtttgctcttgttattgaaagacagggcagagtgacgaaagaacagagtaaaatcattaggatttatttcaataatatgagttttccgttttcggagagtgcatatttaagtgcagcgagaaccggaggagaggttggcaatttccgaaatgtcatatctataagtaagagttatgcaggtggcttttgggtcaacttcttccgggcattatacaaatccggaacgcagaaagatttgcaggatatgattgattatacgacgtcaatcattatgcgtttttcgattcttggaaatcctgacagtaatatttcaaatgcaatctgtcagaactttattgacagcgtaaattatcagattaaccaagtgcgtgagatttccattaaggaagtggactggcttggtgtgataccgatagaagaccgcttggaagaaatgaagtttttctatgaggatttgattgacaggtcaaatatcacaaacgacatttcaaaagaagaattgcttccgtatttggaacttcagatattgaattgtatctgcgatgttgtaatgatgacgaaacagccgaagtccgtgaaactgcgaatgatgaatgatgcagtcagactttcaggcatacatacaggtgtaacaccggaacaatatgtaagagagattgctaacaatacggagatagggcagttttataaaacaatgttctcatcaggtaatccattgggttcattttggctcgtgatttttacaatgggtggacagctttatggaacagacgcaactgatgaaccgattggaattgtcaataatattttttctattttgattcagattgagaattatcttgatgaaaagtataacttcttaggaaaagacagcatagcgaaagattatatgttgcatatcatcgagcagcttgccgataagtgcaatgaggaggattagattataatggataacattgaaaaagatatagctcagggctatgccgattttgcagatgatgaaggaagcacagcagtaggaacagaggaaaatatcgcagcagaaaacagcacatcatttagctttgaagaaacttccagcttttctgagatgagtgatataaacagaaagctccgtacttatttcgatggaaagattgtccgcaaggatttgacgaaatccattaaagagggggcaaatgttccggtttacgtgcttgaatttttactgggacagtattgcagttctgatgacccatctatcatcgaagaaggtgtggcgaatgtaaaaagaatactggcagacaattatgtacgaccagatgaagcacagaaaattctttccctgctccgccaaagaggaagtcatacagttattgataagattacggttaatctgaatattaaaaaagatacttatgaagcagagttttctaacctgggaattaaagcaattccgattagcgaagattatccgagcaaatttgaccgtttgctttgtggcggtatctggtgtattgttcagcttgaatatgaatatatagaggaagataagaatgcttctcctatccatatccgtaaacttacaccgattcagatgccgcacgttgacatcaatgaactgaaacaagggagaaaggcgtttacaaaagatgaatggataagcgtaatgctccgttctatcggcatggaaccggacacactgaccgaaagagaaaagtggctgcttcttgcccgtatgttaccacttgtagaaaataattttaatttgtgtgaactcggaccgagaagtacaggtaaatctcatttgtacaaagaaatttcaccgaacagtattcttgtttccggtggtcagacaacagtagcaaatctgttctacaatatggcaagaaagacagttggtcttgtcggtttgtgggattgtgttgcttttgatgaggttgcaggtatcaatttcaaagataaagacggtatccagataatgaaagactatatggcttccggttctttcgctcgtggaaaagaagaaaaatctgcgtctgcatcaatggtatttgtgggtaatatcaaccagagtgttgatgtgctgttgaaaacatcaagtctgtttgctccgttcccaccggaaatgggaacagatacagcattccttgaccgtatgcactgctatattccgggttgggaaattccaaagtttagaccacagcactttacaaatgactatggatttatcagtgattatcttgcagagtttatcagagaacttcgtaaagaacagtatggcgatgctttggataaatatttccgccttggaaagaacttaaatcagcgtgatacgattgcagtcagaaagatggtcggtggatttatcaagctgctttatcctgatggagaatataccaaagaagaactggaagaagttttaaagatttctcttgagatgcgtcgcagagtaaaagagcagttaaagaaacttggtggtatggagttctatgatgtgaatttctcgtacattgataatgaaacatttgaggaattctatgtgtccgtaccagagcaaggcggtggaaagctgattccggaaggaatgtgcaatccgggacaagtctataccgtggctcagggtaaaacgggtatgcttggtgtattccgtttggaatctcagatgatgccgggtaatggaaaatttgaacgctctggtcttggctctgatggaaaatgcaaagaagcaacgaacacagcatttaatttcttgaaagccaattctaaccgtattagtggctctatcagtacgacgacaaaggattatatcatcaattaccaagacctgcagggcattggtatgacagacaaattggcactgccgaccttgattgctttggcgtcggtagcacttggaaagtcagttgcaagtagtcttgcagttcttggagaaatcagtattgcaggaacacttattaaagtagatgagcttgcaaacagcttgcaggtatgtttggacagcggggcaaagaaagtcttgttgcctatcgtatcagcagcagacatcggggcagttccatcggatttaattggctgctttaatttgattttctattccagtgcagaagatgcagtatataaggcgttgggtgtggaataaaaagacaatgcgatgatagattttaaattgtgcagacggtctgcacaattaggaagggcaggctatggaaacaaagccaaggattttatatttacaaaagattttactggaaagaactgatgaagaaaatcctctttccacaacacagttaatcaatatattgaatgatgaatatggaatatctgcacatagaactactgttacgaaagacattgctgcacttcaagagtttggaatggatattgttactatccattctactcagagcaaatactttgtagccagtcgtaagtttgaattgccggaactgaaactgctgatagatgcagtagaatcatccaaatttattacaagtaagaaaagcgacgcactgattgagaagatacatacaatgacaagtgcagggcaggtggcaaaactcaggagaaacaactatgttgttaatcgaataaagccggacaacgagcagatttattatattattgatacgataaatgaagccatcaatgcaggtaagcagatttcttttcagtattatgattataccggattgaagaaaaaggttctgaagaacaagggcgaagtgtataagctcagtccgtataaacttctctggtgtggggactattattatgctctcggatattcagagaagaaaagcaaggttatcaatttcagggtagaccgtattgcttccaagccggagatattggataaagatattgttcctatgcctgatgattttgatattgagaattacacaaaggaagttttctttatgttctcaggcgagaaagttcgtgtggatttacgatgtgataatagcctgatgaaaacaatggttgaccgtttcggagaagatgtgacaacccttgcatatgatatgacatctttcagagtacagaccgaagtatcagctagtactacttttttcggttgggtgtttggcttcaatggtaaggtacagatacttgcaccggaaagcgtgaaagaacagtacagacagatgattgcaaaagccgatgaggatatgcaagagagtgagtagtgattcgtaaatgatttaaaatttgtgtgaaaaatcaattattacgaatatgaaaatgatatgtttttaaattgtgcagacggtctgcacaattaggaaggagtcaatatgcttacaccgtcaaatcaatatttgcaggcagtagaagaaataaatgattatgtcaatcaggctaaatgcagagcttctgtcagtgtaaatagtgagataatgaaaacaaatatatttattggaaatgttattatccgtaattctgagtggggaaataaatttgtggaaaatctgtctaaggatatgaagatgagatttccaagtgcaaaaggttattctgtcagaaatttaaaatatatgaagaaatttgcacagacttttacggaagatgatgtagatgagtacggattgggaagaattacttggagtcatcatcagatattgatgagtaaagtgtcaaatcgagaagaatatatatggtatctggaaaaaactttggaacataagtggtcagttgatgatttgacttcccaagttaagagtcaattatatgagcgacaggcagttgctaacaaaatatcaaattttgaaagacgattaccggctgaacaaaaggatatggtattaagcacaatgaaagacccatatatgtttgatttcatcgattatacggaagaaatgttggaaacagatatagaaaatgaacttgtaaaaaatgttacttctctactgatggaattaggcactggttttgcttttatgggacagcagtatcatcttgaagttggcggaaaagatttctatatagaccttctgttctataacacaaagcttagatgttatgtagcaatagaccttaaaactggcgagtttaagccagaacaggcaggaaagatgaatttttatttatctgctttagacgatttagtgaaagctccagaggataatccatcagtgggacttattttgtgcagagatgaaaatagaacaattgcagagtatgcattgagagatatgtcaaaaccgattggtgtcagtgaatatcacttatgcacggatttaccgttagatttgaaagatgcattacctgccgtagaagatattagaagtagaattgatatgaaaaagtaatttgtgcagacggtctgcacaaattgtagaataaaagtttattgaacaaaaaagcttttatgggctgtaattttcaatgaaaataaaaactttacttttaacattgactaagttaaaaagaaataaattgagttaaaaggtgcagaggtgttagcaaattgcgacacctcttttcttttgcgaaaaacctacttgaaaaatttttcgtagcaggtataataaaactatcgaaagcagattgcttccgatagaaaagaaagcgaggtgcaggtatgagaagcaagagtcctgaacttatgaatgagataaaaaagtatatcgaggattattacctgcaaaacagacaatccccatcgactacaaagattgctgaagctgttggcattgccagaggtacagcatataaatacttggtagagatggctgagaagaatatgattgagtacgatgggcaggagattagtaccaatgtgacccgtaagtacagtggcgaacagacacagacaccgattgtaggttctattccctgtggcagtcctcagtatgaagaagaaaatattgaggaatatgtatcacttcctactgctattttcggcaaaggagatttcttcatattaagagcgagtggtcagtctatgattgaagcagggattgatgacggcgaccttgtggttgtcaaaaggcaggtagaagccaacgagggcgatatagtagttgcccttgtggataatcagaatacattgaaacgctacttccgagatgatgagaataagaaaatcattctccatccggaaaataagaagatgaaagacatcattgtagatgagtgctgcattcagggtgtggcttgtcacatcatcaaagaactataacagaggacagacgaatgagaacacttgaaggaattcgctatctaatcaatttggatagtgcggaaatacaacagaactttgccggaggagttgcaccgccggacaaggtggagtcggaggtggacacaacttgagtatttatatgtcaagagccgagttggaagaaatcagtgaaggcttgataacagcttatgctaataagtttagcaatcgagtgattcaatccatcgacatagaacatttcattacagaatttcttatgttacgaattgaatacgcttctttcgcagaagatgatgcaggcaggattggttttctggcagatggagcaacaccactgctgatacatcaggacggaaaaattattccctttgttttcccgaaagataccatcgtacttgataaatttcttcttgctgaaaaggagcagggacgtcgcagatttacaatggcacacgaagcgtcacatcatatcttgagtaagatgtatgcaatgccgagtgaaggacgctttcatgcagagtatgacagtgagcgtagttattccaaagaggaactggctcagatgtttgcgtctgtcgagtggcaggcagatacaatgggagcttcgcttcttatgccgagaagaattattgaaaatgccttggcgaaatataatcagtcaaatccgataagagtttatggcgataataccattacttcaaaggataaagcagttatccgcagaatggcagcttatatcggagtatcttatacagccttggttatcagattgagagatatggggctatttgagtatcacaatatccttgagtacatttccaatgagttaaatctgggaggtgtttctcaatgaggttacagactcaggtagcacctgaaatacaaaagagattgcttctgtcaagagtggaagctgaaagtctgaaagagcgtgatattctctgcccgacttgtgggttcaggatacaaagagttttttcagacgcaaccggacatttgagtgtgaagtgtcagaaatgcaagaatgtccatatcttaaatctcgcttacttccgcagaatccgcaggaacggatatggcaggaattgcaggcgatgaagattacaagtaaatatcgaaacgatttctaatcgagtaagcggagataagcaatttatttgctaaactaccaagcaccgtacgaagccggataagtgaagaatagaagtattctttgctgtccagattcgacggtgctttttttgttgctgttttattcgattatgctttgtgcagtattaggtcttttcccttacttgggaaaggacttttatgttttataacgcatggcagtgccagatagctgagtacccgtaatctccgaattttgaaacttatcaatttttcaaaattcaaaggagattacggaaatgacaaacaaacttacattaacagaacaagaagaattatttgcaaaggattgtaaactgataaatcttaaatacgaatataacggttataccggagatgaaaaatgggcgattattacggaattgtctgtaaaagagctttgggagaagtatccacttgttatagaaagatattctccgtttgttcatctttccattgcacagggagaggtaattgacgatgcaaaccgaaatgaggacaagtatgcaaagagaagcagtcgcacacttgactgctatggatatgacgatgaaatgtcctcacagttccataaagaacttgccattatgtttgatgatccgtttgaaagagcagaggaagaaaggcttgaactggaaagagaagaattgcgtcagtgtgaaatcaggaaagcaaggatagcactttcaatgttgcagccacttcaaagggaacgtcttatgaagaatgtgtgctgcggtctgagttccagagtgattgcaaagcaggagggcgtatattacagctccgtagataagtctattgcagcggcaaagaaaaactttatcaaattttatgaaaatctctgattttgggtgtgcatttcagcaccctttgtccaaatgagtgaaggggttatttcattccggatacgaatgacactttaaaaatttgattcttgtgaggttatgtatatgaaagaaaaaatgatttgtcgtggggatttattctactatgactttggagataacagtggttcagtacaaagcggagagcgtccggtgcttgtcgttcaggcagacgattataaccagaatgctccaacgattattgttgcagcggttacaagtgtaatcaagaaaagatatttgccatcgcacattattcttggcgaggagtttggactgaagaaaccgtcaatggttcttctggagcagatacggacagtcaatagagaggatttgcgtgaatacataggtacggtagatgacgataaacttttcaggcagataaacgcaactttgaaaaagacttttggactttgggtttacaagccggaggggaaagaaaatattcgttgtctatgcccgaagtgcctgaatgattacattcacaatccggactatattgtaaggcgactcgacccatttgcaaagcgaaaagacagatgtgataagtgtgatggagatggttgggattatgttgttaccgacagatattcgtcaaagaaagaaaagaggggaagcaatgacagaaaataaaatcattattcctatctggaagaagtccaatcttacagtagaagaagccgcagcttattgtggtattggcccaagaaaattaagagaaatgtccgactcggagttttgcccttttgttctttggaatggaagtaagcgactgattaaaagaagaaaactggacgaatatcttgataatgcgtattcgatatagctgatttgtaaaatgtgcgatgggtcggttcgcataataggctcatcgccattttttaattatcataagggtagaaaaaaacaaggaggtgcttccgtaatggcagatacagaaaagattatccgaaaaaaatatgatgtgccgatatggcataagtctaatttgacgattgatgaagcagttgaatattctggcataggtagagaaagactgagaaaactaacaagccaagaagaatgcccatttgttcttcatataggaaatcgtcgaatgattaagaggaggatttttgatgaatacattgaaaaacttactttccttgaatgatgatgaacgcttacttgccgaagtaagaacatatcaggaaaaactcataagcaatgctgaagaaccaatatgggaaagaaagtggttgacaatcgaagaagccgcagcatattccggtataggaagaacgaagttgcgtgagttgtctaatcaagcaggttgtccctttgcaatatggataggcaataaaatccatattgtgagggaacgactggacaaatatatagataagcagtttagaatttaggaggacacaatggcgacaaaaagaaaagataaatcaagggttgttctgaaaaccggagaggttcagagaaaagacggtacttatcaatttagctggcaggacagccagatgaaaagaagatttgtttacgcaagaactttagatgacctgagagaaaaagaaaagcgtattcagaaagataaatgtgatggtattaagaccgaagcacgatacacaaccattgatgaattatttgacctttgggcaaatatgaaaagagggctgaagaataatacctttgaaaattacaaatatatgtacaatacttttgtgcgaccagtgattggaagtaaaagaatatcaacgctgaagaaatcggatattaagaaatactacaattatcttgttgatgaaagaaatttgaagccttcaacgattgataatatacatacggttcttcatcaggttttacagattgctgtcgatgatgactttatcagaaataacccgtcagataatgtgttgagagaattgaaaaaagcacattgttttcagtcggaaaagcgtagagcgttgacgaaaccggagcaggagctatttctgaatttcctgaaaacccaccctgtatatgaacactggtatccggtctttgcagtaatgataggaactggacttcgtgtgggggaagtaactggattgagatggtgtgatattgatatggaaagtggaatgattgatgttaatcatactcttgtatattatgaccacagaaccgagggaagtaaaagtggctgttatttcaatgtaaatacaacgaagactccggcgagtatgaggcaggttccaatgctcggttttgtgaaagaagcatttgaacatgagaaacagaagcaggaagatttaggacttcattgcgaggtcacgattgacggatatacagattttattttcatcaatcgttttggtcaggcacagcaccaagccacactcaacaaagcaatccgaagaattatccgtgattgcaatgatgagcagtttttgcacagtgatgaacctgatgtgttacttcctcattttagctgccactcgcttagacatacatttacaacaagaatgtgtgaagctggagtaaatataaaggtcattcaagatgcactcggacattcagatatttcaactacactgaacatctatgctgatgttacaaaagaaatgaaagcggaagagttcaaaggattggatagctactttaaagtataatattggacttcacatacagaaagagaacatacagagtgttgtgtgttcttttttcttgttctgaagcaggaaaagataaggcagcgttactttgatgtggattgacattgtaaataagagaagttataatttcttgtatatgaatatgctcttgcatatactactatcgccctacatcatttacatcatattttacatcatttgcccgcaaagtgactcaaagtagagcaaaaatatgaagtatggagaatttaatagtattaacaccagcttggtcgagtatgaaagaaccacaaaaagggtcccgacaatgaagtcactggatgctgataagaagactgctaaggctgaaactaaagcggtagaaactgcaccagagaaagaagaagttattgatttctctaaagtaaaggttgagcctttgtttgaagaatttgttgattttgatacatttagtaagtcagattttagagcggttaaggttaaagaatgtattgcagtacctaaatcaaagaagctgttacagttcactcttgatgatggaacaggcacagatcgtacgattttaagcggtattcacgcattttatgagccagaagaactagttggaaagacacttattgcaatcacaaatcttccaccgagagcaatgatgggaattgaatcttgcggtatgctgttgtcagcaatccatgaggaagagggagaagaaaaacttcatcttttgatggtggataatcatattccagcgggcgcaaaattatattaatctctctatatagcgagcagaaaaaacgtgtactgcaacaaatactgcaacaaatttgtaagttgatatgaagagacatgaagttgaaaagtagataaattttgaatatcgtaaaataacataaaaaggaactttcttttggagaaatctaagagggagttcctttttttgttgcaatatggttggagcgaaggagatttataatatgcaagcactttatggatatcatgaatggaagctatgcccaaacacatttcccttgcaagttatgggatgcaggagaaaagggacttacattatctgcttttgaatgggagaaggatagaaaaacgctgatatatgggcaggtagactatatgtatggaaaagcactttataagcctgaaatgaaagaaggaaatcctataaggttatatagtttggatgaaatcacggagatattctgtaaattaggacttcgtatttgtaacagctttgctgatttcagtggaaagccgagttctgataatgatattcaattgatggtttattccatacgggaataaatcttcatcaaatctttatttttttctgttaggttatatttcagtaagaaatgaaatatagaaggaaggatagtaaagatggaaatgatgttacagacacaaaatctatgtaaatattttagaaaacagaaagcggtaaataatgtttcacttaatatcgaaaagggacagatttatggactgcttggaccgaatggcgctggtaaatctaccacattgaaaatgctgaccggtatgatgaaaccaactgcaggaaagatttactttgatggaaaacttttggataggaaagatttatcaaaaataggagcgttaattgaaaatccgcctatttatgaaaatctttccgccagagagaatttgaaggtaagacaattattgcttggtacagatgaaaacagaattgatgaggtcttgcagattgtatcacttacaaacaccggaaagaagaaagcaggacagttttctttggggatgaagcaaagactaggcattgcaatggcattgcttggagaaccggaacttttgatattggatgaacctacgaatggattagatccaataggcatcgaggaattacgagagctgatccggtcttttccggaacagggaatcactgtaattctctccagtcatattctctcagaggtacagttacttgcagataaagtcgggattatttcaggtggaatcttaggatacgaaggagcattaaagcagggagataatcttgaagatttgtttatgaatgtggtaagaaaaaaccagaaagcaggtgaaatccatggttaatattataaaagcagaacatcaaaaagccaaaagaaccatgcgaaaaaagtttatctggggatttcctcttcttacatttgtcatggcatttatatttactcttgggatgacaaatgcttatgcagaaagtgtttggaactggtggtatacacttttgctgccggggatgattgctctattttgttatctttctgtggcgcaggagaaaaagataaaatactatcatttaatgactattcccacagacagaagaaaattgttgctggggaaaattatttatattgggtacatgattttgttttctaatgtgattgtgtttgcaggagcaacgcttggaggctttcttctaacgacacatgttccagttggaggagcgttgattgcagtattgtttctgacggtttctgagttatgggagattccggtagctttatttttaagtgaacgatttggaatgattgtaaacctgttcgtctgcctatttattactgtcagcggtgtggtaatatcacaaaccagaatctggtatgtacttgtttctgcaatccctatgcgaatgatgtgcccgttgcttcatgttttaccaaatggacttgccgcagaagcagggaatcctcttttggatatgggagtcattgttccgggaatgtgtctctcaatcatctggtttgtttttgtaacggttctgtttttgaaatggtttgagagaagagaggtgaaataagatgattggaagatctcttaatgcagacttgcgaaagatgaaaggaacatctgtgattctggcacacttactgattccgattataaccagcgttatatttttaatatattactttttttcaccatggaatgaaaatatgaaagtgattgcattttatcaggcaataggagcaggacttccggtacttattggaatttttacagcaagtgtgatggaacaggaacaaaatgcaggtgattttcaaaatctgttgtctttaccggataaacttacagcatttttatcgaaactgttgatgctactggttttgtgtctgtgctctatcctattgacagcaatcatattcggaattggatttggaagaatcgcatcaagcgatatcgaaatcatgaaaggatgtatatttgcagcattgctgctgtggggaagcagtgttccactttatctgtggcagctgattctggcttttcagtttggaaaaggggtatccattggagcagggattatatcaggactaattagtgcattgatgcttaccggacttggagattatgtgtggaaatatgtatttgtctgctggacgggtagagtaccatatacttatctgcaatctgtattgggagaaactagtgtaggtgaatggttgtcattcataccaggttgtttaatatttacagggattagtatggtatactatttttggtgggtaaaccactgggaaggaaacagaatatcggaatagaatcgagggaaactatggcaaaaatactggcagttgatgatgaaccggcaattttggaaatgatagaaagcattttgaataaggatggacatctggttaccaaagtaagtaatccactaaaaattaatatggaagaattacatcgttatgacctgattttactggacattatgatgcctggaattgatggcttcgaattatgcaaaagaattaggatacttgtggattgtccgattttgtttcttacggcaaaaacggaggaaaacagtctggtaaacggactttctttaggagcagatgattatatttcaaagccatttggagtgatggaacttcgggcaaggatcaatgcacatcttagaagagagcacagggaacattctgtccggatggttttggggagggtctgtattcaaatatctcaaaagaaactattggttgatgataaggaacttcctcttacgaaagcggagtacgaaatctgtgaatttctggctaaaaacagaggacaggttttctcgaaggaacagatattggaagcggtctttggctttgacaatgagagtaatgacagtactataatcacgcatatcaaaaatataagagcaaaatttgcggattatgattatacaccgataaaaacagtctgggggattggatataaatgggaagagtaaagagaagcaatgcactcagcaggatttttatgagatatgtactggtcatgcttggatcattagttggtttggtgattgttgcttatctgctgctgtaccttttgattagtgtgggctgtatttatccggcaaattatgcagagcaaaagattaatgaagcatatgatacgattctacgtgcagataaagtgactgctgagatgattcccgcactttgtgattatgtaatcttttcagagaatggagagaaaataggtggagatctgtcagaacaatacgaacagatagcatggaatgttgcaaagtacggaaacgcatccgggaaatatttttataaagtaattgtaagagaaaatgaatatgttgtattgcaatatcgcctgacacctcaatatcattcagcttttttgagggagcattttataggaccacagaatgtgatgattattatgtctgtgattggagcggtagcgattatcatcattccgtccatacgttttggaaaaagaatcaaaaagcagatgcagcctgtattagacgcaatcggacaaataaaggatcaaaatctggaatatgagacatcctgttccggtatcaaagagtttgatgactgtttatcggcaatcgatgatatgcgagatgcattgcgagaatctttagaaaagcagtggaaaacagagcaggaaaagaaacagcagatgtctgctttggcgcatgatattaaaacacctcttacgattgtacggggaaatgcagaactactttcagagactgaactgaccacagaacagaagaaaaatatcacttatgttttgaacggcacaacacagatacaaagttatgtaaaacagttgatagatgtcacaaaatcatggaattgcagtgatgttacctatacaacggtgaggttagaagattttttcgcagatataaaggaacatgcactcggactggtagaaatctatcaccagaagatagattggaaggcggaacaaagtgataaaaaggtaacgattgcttatgatccaatgttccgggccgtaatgaatgtgattcagaatgcagtggagcatacaaaagaaaatggaatcatttatattgacgcaaaggagcaggatgaccggctgacattcattgtggaggatagcggatcaggatttacaaaagaagcattattgcatggcacagagcagttttttatggatgacacaagtagaaatggcgaagcccattatgggatgggactattttttgcaaaaactgtggctgaaaaatatggtggaggtattaaactttcaaattctgaaaatacaggtggggcgagggtagaaatatttttcctgagtagtcaagaaacaagctaaatagaccgcaattaagctatgtaaaagaaattttacatgcttttatctaatatgtaaaagccttttgatagacattactactacgtttgctgtaatctcatggaagaaggaggcatacagaattatgatagctgataaaattaaaaatgctcgtactattctttattacataactatcattatagttgggattatatgcacatataagaagagaataatataacttttgttatgatatcaaatgattttttcatttaatataacattgcattggatgaaaaaatgtgtttggagatgaaaacataatcgaattgaaggttgacgattcaaacataaaaagagctgggtggcatctacccagctcaatcttctacatgcattaaatgcagatgttttgatctgcggtagaagcttttatcaatgaaacacttgagtataatccggatggattgattatttttttctctgcttgtcgaaagtgatggatagaatgtataatattgttaatgatccagagatatttattttggaaacagcttaatcaatttggaggtataaaatgaaagcacataagtattggtcaatcggagcgttaattactatgattggaactttttatactggatataaaggatccaaatcaggtcataggtattttgcgtgtagcactcttatatgtatgatcatgtctatgtatacaggacataaaatgatttcaggtaataaaagaacgagaaaacaggtggaaaatacaaaagcggaggaatagtaaatgttagagttaggaataaaagcaccggattttgaattgccggatcagaacggagaagtgcataaattaagtgattatttaggtaaaaaaataattttatatttttatccaaaggataatacaccaggatgtacgaagcaggcatgtggcttttctgagcgttatccacagtttactgagaagggagctgttattctcggagtaagcaaggactctgtagcgtctcacaagagatttgaagaaaaatacggactggcatttacgctattagcagatccggagcgtaaagttattgaagcatatgatgtctggaaagaaaagaaaaattatggaaaagtatctatgggtgtagtaagaactacatatcttattgatgagcagggaatcattataaaggcaaatgataaagtcaaggcggcagatgatcctgaaaatatgcttgaggaattggcataatgaagattattttatcacctgcaaaaaagatgattgtagataccgataacttagcaccggttgagctgcctgtctatattgataagacagcagaagtattaaactggatgaaaagcaaatcaaaagaagaactgaaagctatatggaaatgtaatgacaagattgcagagcagaactttaacagattggaaaatatggatctttataacaggcttactccggctgttttagcatatgaagggattgcatttcaatatatggcaccatctgtgtttgaaatccagcagtttgagtatttgcaaaatcatttaagaatcttgtctgcgttttatggcattttaaaaccaatggatggtgtgactccttatcgtcttgaaatgcaggcaaaggttggaattggagatgcaaaaaatctgtatgagtactggggagaattgttataccgctcagtaatcgatgacagtaggattatcattaatcttgcatcaaaagaatactcaaaatgtatagaaaagtatctgacaccacaggacagatatattacgattgtattttgtgagttatccggagataaattggtaacaaaaggtacatatgccaagatggctcgtggtgaaatggtcagattcatagcggaaaataatattgaaaatccggtggagattcagaaatttgacagactcggatattcgtttaggtctgatttatcttcagattcagaatatgtatttgaacgcaaaataaaatagttattcaggtaaaagatgctcagtttggcatcttttataataatgagaagacatgttgcggcaaatgaagtgtatgaatttataaaagaagcatatccaacaattggaaaaggaactgtatatagaaatcttgatatattggtagaggaaggtgcattaagaaaggttgaagttccggatggaccgaacagatttgattttacattgaaaaatcattaccatgtaagatgtataaagtgcggtgaaatttttgatgtggatatggatcaaataccggatttgctggaaagaattcataacactcatggaattgaatttgtggattatgatatttcatttaaaggcatttgcccgaaatgcagggagaaggtaaaggaggaacagcatggataggaaagcaatgtataagttgagttatggactgtttatattgaccgctaaagaagcagaaaaagataacggatgcatcattaatacagccattcaggcagcttcggaaccaaatcagttaagtatctgtgtaaataaggcaaattatacgcatgatatgattcaaagaaccggaaaatttactgtatcagtcttaagtcagaaggcacaatttgaattgttcaaacattttggcttccaatcaggaagagataccaataagtttgaagcatttgagcagtgtgccaggggcacaaatggtatttattatattacagaaggtacaaatgcatacatttccgtgacagttactaaaacagaggacttgggttcacatacgatgtttatcggtgagataaccgatatggaagttttaagcaatgttccttcagtaacatatgattattatcagaataatattaagcctaagccacaggaggttggaaaaacagaggacagtcagacaatatggcgttgcagaatttgcggatatgaatatgtaggcgaggaattaccagatgactttatatgtcctttgtgcaagcacccggcatcagattttgaaaaagtagtaaagaaaacagaggtaaaagagatggcagcaaacaaatatgtaggaacacagacagagaagaatttacaggaggcatttgcaggggaatcacaggcaagaaataagtatacctattttgcttctgtagcgaaaaaggaaggttacgagcagatgtcagcattgtttttaaagactgcagataatgagaaagaacatgcaaagatgtggttcaaggaattagcaggaattggtgatacaaaagaaaacttagctgctgctgcagaaggagagaactacgagtggacagatatgtatgatggctttgctaaaacagcagaggaagaaggtttccctgagcttgcagcaaaatttagagcagtaggagaaattgaaaagcaccatgaggagagatatcgtgcacttcttaagaacattgaaactgctcaggtgtttgagaagagcgaagtgaaggtatgggaatgccgtaactgcggacatattgtggtaggaactaaggcgcctgaagtatgtccggtatgcaatcatccgcagagctattttgaagtacgtgcagagaattattaagggagaatagacatggaagtaaaatattatgtatgtaagcattgtggaaacattgttgaaaaggtaaagacaaaggtgtacctgtaatttgttgtggagagctgatgccggaactgaaagccggagtaacagatgccgcagttgaaaagcatgtaccggtatatacactagacggtaatctggttcatgttgttggagaaatcaaacatccaatgcttgaagaatactttattgaatggattacattaaataccaatcagggcgtttatagaaaacagttaaatccaggacaggagccggttgcagatttctgtctttgtgacggagagcaggtggaggaagtatatgcatactgcaatttacatggattatggaaatgttaaaataaactttgtacatacgaatactatagagtaaacgtaatattgaacaaaaaagaaatgcacagttcttagcttatcgtgaactgtgcatttttgtaaataaatacttttaattagccgattacggcatcctctgctgtaaaatgttccagagaattttcttttacctgaatgcagatataagtaattccagaaatatcggatgcaaaaaactgacgctttgcagcaggtgcgatttttagccagtctccagttgaaaggctaatttcttctccatcaattatggctttgccgttacctgaaagaattccatagatttcttcattttctttatgagaatgaacaaatgggacatttgctcctgcaggtagttcgtttaaactgatttctgcacctgttaaagacaacttttcatgcagctcaattcggttttcctttccaatagttgtttttgtgtaatttgccataataatacctccatagttaatttgtagtttctggttgcttggtattagtatagtgtgaggcacatacaaaaacaagtacgcacctttttgtaactgtacactcaaaaatgaatgtgttacaatagactcggaggtgagaattatgcgagcaaaagaagaattaccggaatgcccagttgcaacagcagtatctcttatcggaggaaaatggaaactgctgattttgcgtaacttgaaagagcgtccatggagattcaatgagctacaacgaagtatagatggtatttcacaaaaggttttgactgatagtttaagacaaatgatgagtgatgggctggcatatcgccacgattaccatgagcagccaccgagagttgaatacggcttaacggaactcggaacaaaaatgcttccaattgttaattcacttgctgactttggtaactactataaatcaattattgaacagaattaaggacgttagtatttgaaaagctcgaacaattccagtttggagaattgaaaaaaacggaatttacctattaagacatataaactcttgacaataaagctcctatatagtatgtttttaataaactactatataggagcttttgtatggaaatgaatggaggatttcttgtcaccaaaataaaacagcttggagaccggattttcgagaagattctcagtgaaaagaatattgatgcgtttaatggagcccagggacgtattctttatgtgctgtggcaggaggatggtatctcaatcaggtcactctcgactaaatgcggattagcgataacatctcttactacgatgctggaaagaatggaaaatcaagggctgataagccgtgttcagtctgaaacggacaaaaggaaaacactcctgtttctgactgagaaagcacatgccttaaagggcgagtacgattctgtatctgatgagatgggcagtatttactacaaaggtttttcagaggaagaaattacccggtttgaggaatgcctcgaccgcatcagaaagaatcttgaggagtggcagaagtcatgagtatttgtatcaaagatcagattcagaacatgaatatcgtcattggctgcacagtgggatgtacatattgctatgcccgcaacaacgtgaaacgctggcatatgattgatgacttcgctgaccctgaattctttccgggtaagctcaagatgatggaaaagaaacgtccgcagaactttcttcttaccgggatgagcgatctcttcggatggaagccggaatggagagaggaggtatttgcaaagatccgtgaaaatccacagcatcagttcctgttccttaccaagcgacctgatttgctggattttgatatcgatctggaaaacgcatggtttggcgttacggtgacgagaaaagcagaactgtggcgtatcgacgcccttcggaaaaacgtcagagcaaaacattaccatgttacctttgagccgttattcgacgatcccggcacagttgacctttccggaatcaattggatcgttgtcggcaccatgaccggagctcagagcaggaagattcatacggagccggaatgggcatggtctctgacggatcaggcacataagttcggcattccggtgtttatgaaggaagaccttgtccctatcataggggatgaaaatatgattcaggaaatgccggaagaatttaataaagtgttagaggtacagaaatcatggaagaagtaataaatggaatcctcattcgtgaggtggaaacaaagaacatcatgactaagtctagtctgccggtaggcggttactcggtcaatccctatgtgggctgtacacatgcctgcaagtattgctatgcttcttttatgaagcgctttaccgggcacaaggaggaatggggcactttccttgatgtgaagcattggccggaaattaaaaatccgaagaaatatgccggacagcgggtggtcatcggttctgtgacagatggctacaatccacaggaggagcaattcgggaataccagaaaacttctggagcagctgatcggcagtgacgcagatattctgatctgcacaaagtcggatcttgtggtacgggatattgatctgttgaagaagcttggacgtgtaaccgtttcatggtcgatcaacacactagatgaaaatttcaagaacgatatggattctgcttcgagcattgagcaccgtatcgctgctatgaagcaggtatatgaggcaggtatccgtacagtatgtttcgtatccccggtattccccggtatcacggattttgaagcaatctttgagcgggtaaaggatcagtgcgatctgttctggcttgaaaatctcaatcttcgaggcggtttcaaaaagacaattatggattatatcgcaggaaaatatcctgatcttgcaccactttacgacgagatctataacaagcataaccgcagctactttgaagcacttgaagtaaaagctgagaaaatggctaagaagtatgattgtgcctttgtggataatgaaatgccttatggcagagtcccgcaggggcatccggtgatcgtagattatttctatcatgaggaaatccgtgggacagagaataccggaaaaagaaatcgctaatttcaagtttgtagaattcaaaaatttaatatgaaatgtgagatagagcgtatggaaataatctatacgttctatttttttgccttttttgaaaaagtgcttaaaaaactattgacattttgttactggcaaaactgcaaaatcgattttgatttcctgtggtgccagactttcaccatttgatattcaggaacttcgagaaagcatgtcgtatgacgaaatggaactagatatgatcggcgatcagagaacagccatgtttgtcatcatcagtgataccgatgacacattcaattttaaaggtttttaactttcctgattttaaaataataccgatcaataatatcctgcaatgtaatggatttcattttttcatctaccatattttgaatttcatgatagaagtccccaatagcgaattgaatgttgataccgattccacaatccggattggtatctgtgtccaggtgaagcagtggcttatcgccctctacggctcggtagatgtcatacatattgattttatctgccgactttgcaagagcggcattcgcatgaccttgtgtgttgacaacaatgcctgcatttttcagggttgccataagctgtctgacataagccgggtttgtcttgatactttctgcaatttttgtgctggagagttgttcgtcatctccaagagcaataaatataagaatatgaatagtgtcactaagctttgtggaatatttcatttgtcacctcgaattttcttcttgcaatttttaaatttacatgataatatgattttgatgcttgatgtaaatttaattttaacaagtaaaaaaataaaagtcaagcaaaataaaaagtgtggaatctgatataaaaaaggagataaagtggtgtatgcaaaaggaggaacaagtcagttttctggcagaaaaaatccgtcaggcagatgccgttttaataggtggtggttctggtctttccagtgcggcgggatataaccattatcattggctgccctatatggaggaatgtttacaagatttcaaggagtggtatggactgaaatctccctttgacggtttttactactgttattcatcgccggaacaacagtgggcatattatgcacgttacatacaaagtatgtgggatgcacctacaggacagccatactatgacctgcgtgatattgtggcggaaaaagaagtctttgttttaacaaccaatatagatatgcagtttgaacggatttttaagaaagaacggatttgcgattatcaaggtaacagcggttatgttcaatgcagtcagccttgtcatgaccaaatttattccaatgtagaaatgattcgcaggatgaacgaaaatatccgggagctgcgtgttacttctgagcttctgccaagatgtaatgagtgcgggagaatcatggttccctgggtaagggatgatacatttttggaggggaaagactggagggaaggtgtaaggcgatatgagaatttcctgaaaaaatatctcatgaatggaacagataagaatgttgtactgctggagctgggggttggtgagatgacacccagtattattaaactttctttttggaaaatgacatacaaaaatgaaaaggtgttttatgcttgtctgaatcagaagaaatcttcagttccagagcatataaaagacaaaggcatttatatagcaggagatttggcagaaaccctgcgggatttaaaagaaaacatagcgggaaaggaaatgtgatgaagatgaatgtatatcaagagataagtcaaatcatcaaagaagcagatggtattttgattggagccagtaatggtttgtctatcgcagagggatataatatttttgcagatgacgcatggtttcaggaaaatatgggagatttcagagaaaaatacggactgcgttgtgttttacacggattttcagtgccaatgaaggtagaagaaaagtgggcgtttgtaagcagacttgttaaggcaaaagctatgcaggatgagccgagtgagattatgaaaaacatctatgcactagtaaaggataaagaatatttcgtagtaacttccaatgcggaggatcattttgtgccggcaggttttgaggcagatcgtgtttttgaaatggaagggaaattaacccagatgcggtgcaagaacagatgtcatgatgaggtctatcctaatcaaaaagcagttctcgccatgacagaagaggaagtaaacggaagagtacccaaagagttactgccgaaatgtccaaaatgcggtggagatatggaagtaaattggggtgagatgtcctcgtttacagaaacgaaaaattggaaggaaaaggctgcccgctatcaagaatttattcagaatttacatggaaagaagctggtaattctggaatttggcattggttggagaaatcagatgattaaagctcctttgatgcagctagcagcagtagaaccacaggcaagatatatcacatttaacaagggcgaaatttacattccagaggaaatcaaagaaaaagccatcggtgtggatggtaatcttacggtagcgttaaaggaaatcagaaagggaaggatagactaagtaagatggttaaagatattacagttgtgagataggagaatgaaaaaaatgagctgttatgaaaatttggtaatgaaaacacaaatgaactattccagacactatagtacctatgcatccggcggtactgctgtagtgttgagcaaacaaaaaccacttccttatgaggaacagattcaggaatttgttcgcagagtgcaggaggcagagtgtatcatagtaggcggagcatccggtttatcagcggctggaggtggtgacttttattatagtgataccccttcttttcgtgagcattttggaaaatttgcagataagtatggattcaaaggtgcttttagcggaatgatgcatcggttttctacaagaaatgaacactggggatatgtggcaacctttttaaatactacacaaaatgcccctatcagagagccatatctggatttggatagaatcttgcagggaaaggaatttcatatcttaacgactaatcaggatacacagtttgtaaaaatttatctggaagaaaaggtcagtgagattcagggagatcatcgtttcttccagtgttcccagtgttgtcaggatgaaacatgggatgccgtacaacccgtggcagatatgattgcggctatgggagaggggacaatagtgccggatgaactgattcctcgctgccctcattgtggtgcggaaatgtttccgtgggtaagaggatatgggaattttctgcaagggaaaaaatacgaagaagaatatgagaaaatctcaaaatacattcaaaagaacaaagatagaaaaattctcttgatagaacttggagtagggcgcatgacaccgatgtttatacaggaaccgttttgggaactgacaaacagcttgaaagatgcatattatatctccgtaaattcagaatatcagtttttgccggaattcattgaagataaggggattgctattttgggagatataggaacagtgttaaaagatttgcggaaagcaaaagaggaaagtgcatttgtatgttaagttgattctgtttgaaaaaaatactgctatataaccaataggctcagggaaattcctctgggtctttcttaagattcctcgaaaattgagaattacatatgttcaattctttgtattaggtatatattttgaaaagttattcggttatactgacaatatcaaaaggcagaactgttagaataaggtgagcagatggatacagcacagagaataaggttaattcggatgattgaaaaaatagagaagaacccagaattcagtagtaaaatcggtgtgagaaatacatctgagtttatatcaagtaaacaatcaaaaaaatgaatgattcaaatcataacaggagtcagaaggagtagaatatgttatcgttactatttgctatatgcatgatctggtttattggaaaattttttatatttggtgtaaaagcatcctggggaatcttaaagctgctctgtacagttgtatttttcccggtgattttgataggaatggttgttggcggactgatttatattgcatttccattgttgatcatcggcggaatcattgcacttatatcatctaactcataaaaatacgaggagggaagaaattatgggatatgatatagaaaaagagaaacgagaagcgattgaagcaggacaacgtgcgttaagtagtcttcgaacagcaaaagaaaacctgaacagtgcaaaaaattggggcttggtggatatgtttggcggtggattcttttctacgatgtttaaacactccaagatggatcaagccagacaaaatatggaacaggcgaaatatgatcttcgtaatttcagtagggaattaaatgatgtgaacatggcttgtaatttaaacatcaatactggagacttcttatcttttgcagattatttttttgatggatttgttgtggattggatggtgcaggatcgaatcaataatgccagacatcaggtggaagaagctatccgcagaacggaatacatcataaaccagttacagcatatgtaaaggaaagaggcagtgaaccataaataggttcgctgccttgttttttcatacttatttctgtttctttttttcttctctgagcaattcgatgtttagtccctgctctccggctgttttatcaacccagagattcagagaatctattgccagagaaatttcatccagtttgttactgataaaagcaaaatccttgatctcatcatcgctgatcttaccatcacgggcaatctggatcagacgtgtggtaagaggattaatctcattcagactggcaatggtttccaggattatattggataagtcagaaacttcgacttccgggacataacgatgaccgatttcgcatttatgagagcagtaataattgcagagatctggtcgcccgtaagcgtctgccatctggataatatcgtaaggtgtaggttcctgcatttcatattcaaatttttcaattttagaatcagaaacagcagtcattttttcgctggcttctgatctggtaagaccggcttcttcccggcaaatctgataaattgtcttattttctcttgtagattgtttccccatgagaataacctccctgtatatcgcaaaacatgaggattatcgggtggtaagtccacatgctgtacgtctatttcctttatgaatttcattatacttgaagcatcaagaaacaacaagagataacaggaaggagcaagttatatgcttttgtggcaaggagataaaagaaggctgcgaaacataaggcatgataataacatagagcagattcggaagaatggatttatgagatattgatctacagagcctgccaccggcagcttcttccgaacgcatggcgatatagaaaaggcagtgaatcaaaactgattcactgccttctttgttaacggctgataactttaacagttgtatcggcatgatcatctgttagtgcaaatttatctttcaggccttctgtgatatagacttcaccggaatccgttacgaagaccgcttcaaaatcattactctttccccagaaatcggccgctttttcaagacccataacaaataatgaagtggataacgcatcgcaggttccgccatcatcgccgacaattgtcacggaacaaaggccgctgtctgccggatgtccggttgccggatccatgatgtgccagtaggtgtgcccatcctgctcaaagtagcgttcatatccgccggaggtaatgacggcctggtctgtgatagaaagaaccatcataggcgtatcgccattcggatccttgattccgactttccatggagaaccgtcgggcttggaaccgattgtctgtacatttcctccaaggtttaagagtgcggatttgacaccgttatcgcgaagatactgggcagattgctgaccggcatatcctttggcaatgcttccgaggtcgatggtcattccggaaggaatggttacgttgccggttgtcttatcaaattccaccttagtgtaatctaccataggaagtaatgactggatcgtggattcatccggtacctggtagtcaccggtggtaaatccccatgccttgacgatcgggtagatagagatgtcgagtgcaccgtctgtctgggtacacatttgaagtgccttctgcattaagtcagagacatcgccggtaagggttccggaaccgttctgattgatatgatatatctcacttccggaatctgtgacggatactttcttttcaagatccgtcagtactttctttgcaccttttagtacttttttatccccatatgcgctgaatttgatggtagtatccatagcaaaaaaatcaatgctttccggttctctggctgtactttttgaggtgttttttccggtgccggaagcactggaacatccacacgccagacaggcagtgatcagtattattgataaaattttcttcataacaaaatctcctcagactataattggtgaaaaattttcaacagtgttagtttggattgacatggcaggaaaatattggtagcattgtgctacctaggttagatccacctaacaaaactatcatttaatataccatgaaaggagcgggggttcaatatctaattgttattgagatggtagtgagaatggaaaaagaatgtaaaaatactaacgaggaggaaaatatgaaaaagaatgtaaaaaaagtaatatcttttattctgtccatgctggttattatttctacagcagttacgcctgcgatggcagcggggacaaaagaggcaccgacagaagtaaagagcgttacggccagtggtctttggacaacagttttaaatctggagtttgaagatacaacctggatggataatattaataaagtaattgtaaatgataaagaatgcaagaaaagtacgatcaacagtttctcgagtgatacaaatatttgggaagttggcagtgctacgggtgcatatggaagttacaaagcattgaaactggcagtttcggatggaaaattatggacagttaaggtttcggcagacggatacaaggatctgactgttaaaattaccaaagaaacagtaaattatacagatacttataaagcggaagtagtttcaaattctggggagacaaccaataagagatatactgctgacgtgacacctgcagtaaatggtaaaataacacttagtgccgcaaaagatataaaagaaggtgacacagttaccgtaacagcaactccggacgaaaattatgaagtagttgcagtcactgtaaaaggagtaagtggaaaatctgttgatgtccagaatgcagaaggaatttatacatttaagatgccggcagaaaacgtaattgtatcagctacatttaaagagaaagctatagccggaaataaaaaaattgaagtgagtcaggttagcatcaacaaagatctttggggaagtgactgggaattcacttttaaaaatgctgaagattatgtaagcgcgatcacagatgtaaaagtaaacggaacttcatgggaggaaaaatcttatagcgtttcgtcaggcggccagtattataaaaataccagcagcaataaattagtctgtgcagcaagagagtacagtgcaaatccgacaattccggttctgaaaagtggtgatatcattaccattacagcaaatggatacgaggatctgacattcaaacttgttatcaaagatggcaatgcgtctcttgtagaagacgatggacagggagatccatatgatcttcatgtaaagattgatggttcgttcgaggcagctattgtaggacagaagaactacgatggtgtatcaagtgcaagtgtcggaggatcatccagcaataagaacagctcagtaaaagtgtatggcgcccttgtgaacaaaggaacagagcctgcagacaatgactgggaagagttggataacttatcaaagattaaattagacggaagtaaatgtaaagtagatatcgttccggacacagcaaacggaactcctgcagacagcgacagcggtatgaaaggtgtttatatgacgatcagcagtaatctgacacttaacggaacaccgaaagatgcggggacatatctggtctcagtatccattaccgatgatcagggacgaactgcagtcagcaatacactgccattcagagtttattcaggagatgaaactcttgcagaacgtctgaaagaagagaattttaagaaatatgacagcggattgtatgcatgggatatcatggaaccatgggcaatcagcaaatttggaacgaatgtagaaggtgaagaagaaagcgtacgcgtgccggcagggttagaagcctggttcggttcaaaagagagcggtacatatggctatctgggatacgatctgccgtggaagaaggtgatgagtggagatatcccacagacactttatattccgaatggatgtaatcttacattgacgaatatggaaattctcagcagtgtacgtattgtagtagaaaacggcggtaagctgacattgtcagattcagttgttcagggaattatcgatgtccagagcggcggtacattctctatgaattatgacgcttataagaatgcatttacaacaggttcttctatttgcggacagctgcgtctggcagatggggcaatattagaaaatgcagctatctattctcatgcaaattatctggcaaatggggatctgacagaccgcaacacatcagaaccggttgtaacagcaacaggtaatgtgacgatcaaaggtcaggtatttattaaaggtgccgaagatggagacggaatcggacagacagcacttcgcgtagatggaacactgcgcctggcagacggggcaatactggttacaaccggcggagaaggtatgatcaacgaaaatgacggtggaactgcaattgatattaagagcggaaagattaccggaaatggaaaacttgtagctattggtggtaagacattctggggaaatggtggaaatgccgtaaccggaaatggtacgattgagactgcatcagcattccttcagggagctactgcaagtaaagcaaaaaacaaagaagcaggaaaagcaatcggagatagcatcagagttataacatcggatcgttatatcaaagatggagaagtaagcgataattacggaacagatgatgctttgagcggtctgtactggagagaaggaattgacgcaacaccaccgttagacaaatatgtaacatcagaagtggaaaatattctttcattagaaggtacactggataagatttatgacggcaaagccgtaaatggtccggttgtaaaagcaggagataaagtacttgcagaaggaacagattatacactgacttacaaagattcagaaggaaatgaattgtcagaaactccggtaaatgtaggtacgtatacagtaacagttaacggtcttggaacatacgcaggcatgaacctgaacgtaacatttactatctcgccaaaggcagcagaactgacggttgtagcagatccatcttcagcaaaatatgatggaaagagcaaaactccggaagttacagtaaaagacggagataaagtactgaaagaaggaacagattatacactttcttatgtatatggtgaggatgccgagacaaaagatttcgcaggggcagaatttgtaaaagaaggaaattacacaataactgtaactggtatcggaaactatgaaggatcaacaggaaaagcagtatttacgatcagtaaaaataattctgcatctacagatccgacaaacccttcaaatccaaacggggataagaacgttacagacaaaaaagtaagcaataatacaaataatgttaaaccggttgtaaagaatgttgcagcaaagaacaacaaaaatgttccaaagacaggtgataacgcaaatgtattactctggatcgcgcttgcagttatttcttgtggagtactcgcaggagcaggtgtagcagtcagaaaacgaaaataagattataaatcatatagcagaaaaggaagcatttggagtaggatccagatgcttctttttgttataccaaagtatgcatgaaaagctgttggtggtagcttttgcagagggttaatgtgttatactatatattggttaccaacattaaccggcagaaaaaattttataagttagtgtgaaatacggaggcgtagaattgagctataaaaataattcaaaagtataccatgaagccgacatcagaaatgattacagaaaactgacaaagcttctgatcgaaaaaaatctgacaatcaccacaatggaatctgcaacatcagggcagattgcttcgctgatcacagatacagaaggatcatcagcagttctgaagggggcgtttgttacatattgtaatgaagcgaagatcatgcagggcgttccggcagaagtactggatacctatacggtatattcaaaggaaacggcagaggccatggccagggcatgcgcagaagcctacaatgcagatatcggaatcggggttaccggaacaatgggaaatattgattcatccaatccggatgcttccgttccgggacaggtgtattttgcaattggagtaaagggagagatacagtcgtattatattgaactggagccgcagccgactcgcctggcatataagcttgcagtggcaaaagaaatctatgacgagcttatgaagcggatttcgtgatctcttgtaggtattatattatagaaaggattatattttgaaagtatacaaaaaaagtaatgtttattaaagataagattcgttaaaacggtattcgataaagcaatattcagtaagtgttagtaaatatcaataaatgataaaaaagaaataagagaggatgaataatcatgacacatgaagattatgagcgggcagcaaatcactggaagattaaagatgcatctgacgaaaaaatggacagagatacattattgaaagaaatcgaacagtacataaaatcgaataacacttgtgcactggcaaccggaagcggtgaatttgtcagagtaacaccaatcgagtacacatatcatgacggggcattctggatgttctcggaaggtggagagaaattcaaagcacttgaaaagaataagaatgtgtgccttgcaatctatgataagtatgaaggtttcggaaaactgaaaggtatgcaggtgacgggaacggcagaggtggttgattatttctcggaggaatatattgcagctgcagtatataagaaaataccgatagaagcacttcgaaaattaccggagccgatgaatctgataaaagtagcaccgtccaaaatagaatttctgagttctgaattcaaaaagtatggatgtgcaagccggcagcgtgtagatgtatttagagagcggtaattatatagagataacaaatatagaatagacacatagagaacccaatagttattgtgaaaatgtctgcagaagaaccgtgaataggattcgaattgtctaaattgtctgaattgcagaaaatataaaaacaatcttgacaattcaaacccccttgtggtatattaatctagctgtcgcgttagacaaggccgtgaggtaacagagtcgaagcagaagacggcgctaactgattagagaatggcaggcaatgctagacggtaatcagaaatcttcaggaattgctcctgaaaaaaagaataaaataacagttgacaaacacaactgattatgatattcttattcccaatgtttcaagtgccgatgcaagtaccggatttcttgtatccggttgaatttttcctaattggtcaatagtgattcttccatataatccacctggattatgtatttcaatcctgtcttcaaacattataagttgaatcggcattccttctgtatgaatactataatcacgatgtactaatgcatttataatagcttctctaaccgctgttattggatagtctgttctgtcagttcttcgtccggttgtcggacttataattgtctttgtccgcatattgcgtttcacaaataataatgcctcatccaacatttccggaattgttccttctattctctgattatccgagaatctttcccccatgtcgccaagacttcctattgttctcccaggaattacaattgccgtaatacacaattgtggaaaatatgcctgtggatatggactaaaaagcaaagtcgcactaagcgttactttctctcctcgctttatgctcataagttcataaatactttcattatcaagtgttgctaatctttgttttcctctctttaacagttcaacataacgattcagttcttcctgatccaatgacattaatgttactctcgggacctcacggatatcgtcttgatattttcttctatatgcttcataactatatatttcgtattctgtcatcggttcatcactatccccaatacgggtataggaccccttcaaccttccacgtccttgataatagcaaggtctgtctgccatatctattccgggaatttcagcagaaacaaattttttattttccttctccacaactgtaataagcggccgtacaaccggattcatctgcaagcattgttcgttaattttcttttggatgtcctgagcatcataaacaccaacttctttataatcttgtttctcatcaattccaaaaacaataatgccaccatcatcctgattagaaaagcttgacaaagaatcatataatcgtttcggacatccttgctccgctgatttcaattccaaattctgcgtttcgcatttcattttttgaattaattttagtttgtcatataattcttctgttgtcattttagttcctccatttatattttagattctagcactatatttaagtttattcaagaaactcaaatattattcttatgaactaaaaaagaactcaaatttatacttcaaatttgagttctttttcattttcaatgtccacttattcctctctatattttctagtccatctcttcttcaatcttctccgcaaccgccacatccgccggcagccactccacatccgtaagctcctccctggtcagccatctggcagcctcatgctccttcagcaccagatcccctttcacgatctcacaccagaagcaatccatcgaaagatgaaatcccggataatcatactccaccgtctcgatccattcgccaaccgcaacttccgtatccagttcttccatgatctcacgcttcaacgcttcctgcggtgtctctccggcttcgatcttgccgcccgggaattcccatccgcctttgaactcgccgtatccgcgctgcgttgcgaatatcatcgttcttccgtcttcctttactgcctttataactgctgccacaactcttatcgtcttcatcttaccttttatctcccgtcaaaaatcttcctgtaacagtctctattcattcacaatatactggtaaatatcctctctcaccggagtctccagctcccattcgatctccaccgccgtcttatccgtattcggcatcacaaactgcttcgcattcccggtcgcgatcacacggcccagataatagaattccttggatatcttatcatccttattctttctcacaaacagctgcacatctatgccacgttctgttgcgtttaggaaattctgcacatcttctgagtccatgcttcttccgcttttggaaatcgcgatcagccggttctctgctacgaaatgatcttcgtatttcgtggtatcgctgatattgtcctgcttatcgtagttaatgaatatcggaaatgtcttagtctttttatcatatttgtaaccgccgatgttcaacggcacttcatttctctcccagttcagcagacggcaggcatcctcatatgtatatttctgatacaataccagattcgtatcctgataatggtaactgtaattgaccttatatctcgagattccgaagtccaccagttcctccagaatcgcacagaattccggatcctgtaacattttctcatacacatcggaaatgccataatcatcctgttccttcttcagaaatacacactgtgcgtaaatcttctttgccgcgctcgtcggaaattcattggtcatcatattgatcacattttccgtgcaatactcgtccatctcactatgatacttctcggataaatgcttctgcagatgcccaatgattccatggtgatactgcaacgtacgtttcaacaattccagctcatgaatccgcttgccactcgccagctttttggaaatgaattcgattgctttttcttcgtcttctgacagccggatggtatattccttttcgtatttcacaaggaatttataatacgaacccaggctgttattatcgaagatccgcagcacatccatttctccatatttatcaaaatccgcaagcgccgggatatgccccagcttattcttcagattcgtataattctcccggattaatttgatatcgctgaagttcgcattatcaatcacctggaaaatccgctttctggaaatctcatcgaagtgaatcgtgctcgcccccggaatcactctgccgccttccgtgacatagcggcggatattgtccttgttataactgcggtcgccggacagcgcaatcggaatcataaagttattccgataatttccgatgaaatccagtacaacgacatattctttgttctcggcttttcgaagtccccggccaagctgctggatgaacacgatcggcgactccgtcgggcggagcatgatgacctgattgatctccggcacgtccacaccctcggaaaatatgtctacggaaatgatgtagtccagggcatcttcggattcttctcctgcacaaaatccttattgaccacaccatctttccccttaatcatacgattaacataagcctttgcactatcactctcttctgcaatctgcacctaatttttttcttactctatgcactttaattcgatattatttttaaccataattcctatcctctatcggaatttacgttatttctaacaacttctaatcttatttctcaaatgacatgttattttattttcttcattaatctgattatcaattatttcatcccatttcatatctttccaattctctggattcaaatttattcttaagatcttttcacaatgtgcaaagaaattcatcaacattacatatgtttgttcttcaataaaaatcccctcatccataactaaatcgtaataagcaaacgtcatttcataggcactagcataagccttctgaatcttctcttttccttccgttgtatcttcgattcctttttcgaccaataactttattataacaagatagtccaaaacactcttgctcgcttttctaaaacctggcataatctctttatatattttgaattcctcgtcataaataaaaatttctttatgcaaaattttctcattcaacgtccggcactttgccaactctactgcaagttcatttttataaccttctatttctttttgatatttatttttctgtttttccataaaccactttgcccataatcttgcaataaaacctgataccgcaacaattattgctcctgcaccacctagtgccaaaacaatttttccaaaaacagaaaaaatatctatattattcaatagtcactttttccttccttttaatcttgagtgtatactttatctagtacttcctattcatcatctccattttttgcttctaaaatattactttttgcctctcttttgaattcatcagcaacaccccttaaaatacctgcatacctggaatatcctcttgactctgcaatatttgctttattttcataatcttcagctaattcaagctctggttttccttccggatcaatccagtgtactcctctttggttaattatgcccaaataataaccacgacgcagttcttcattctctactctgttaagttcttcaataattgccgtttggggaagcttgtcctcatctaattccgcatatgacaatcccgaaccaaccgtatgcattgccacttcatatcgatcattatccctgctccatgtttttacagtcttcatccaataatcaaatcgttttgcatcaaagttaccattccaatcaatcccaggtataactttaaattgaaatagtatctcatacaatctatcactcaagcttttattcaactctatttcccgtttttcaccatttctttccttataaaacagctcaatcaaactgcaaaaatattccggctcaagacttaatcttgtgtttaatgcgcgaggtctgacttccgaatactcgtctaacattggtaaataaatgaattcaatatcactgcgtaattctaaatctatatcctcttgctgctgaaaccaaccaataatcttttgaactgcgtaatcatcaagcgtttccacccctatggattcctctgttcctgcaagtttcattaacttatatatacattctgcattaatgactgcttcacactccgaatgtccaataatattaacagctgtcacatatcgcttacatgcaacaagtttttctacaattatttttaactcttcggcgtcataacagctatatggcatagctcctttttcccagtacgcagtatcatcatctaatacctgatttatcacatctagcaactgtaaagaaaacggaattttagaaagtatttctaacatgaattcgtcttccatctggcataatgaagtttccaataatttttctgctccctgagtatacacaaaagatatcagacaattaatcgtaaattctttcgataatattcctataaaatatttttcaattattgaagacatttcatttggtctcaaaaagcgtcccagtttattagctacgtcatgcacgttttttactgcacagccaaaccgttctacttcttcacttccgtactcatcaaatatttctttaacaacagataactttttatcctctagcatcttccatctatttgcataatttcctttatcaaacaaacacctgtttcctaaatagcattctcgatgcttcactcttatatctgttggttccattttttctatcaattgttggattctatctaactgcttatatattacctttccttcagttggctctattcgcgccatacattcacgtaatttaagccagacttcaaaagtattctcatctgtaccaaattcaaaactattttccaagcactccaaataatcagtcagagttggttcatacatatatcccaactgatcgattaattctacaagtttttcattctcattacgggcagtatcaacagccaattccactaagtacacatagcattcatgggcttctgcattcgttacttttacttcttctggaatctctaatttcaaatatttcggtcttggattacctgacgttgaacgtgtcttattaggcagcaatttcttaagtgtactccaaaacacacagggattatcagtttttaaacattttaatgcattctttcttttttcaagatcagccatcgtctgcggataccaaggaagtaatattgatacaattgaatttataggtgtatttgtccaatttgtacgctcgtatggtaatgcttctaacaatcctaatacacttatagaatgcacaagatattccggtgaccatgccaagatttccaaagcccacaacaaattagaaatatagtttattcctgataattcaccactttttggtggaaataagttcactatttctgtaggattatttataattcctcgctcagcttctttcaaaaaagcttccggtgaaagttctgctaaattctgtaaacaatcccgtaaactagtccatgtaatccacttggcatcctgcagtaaagtgcttaccaacgtatatatattgttttctattttctcctgattgcactgtgataattccgaaagatttttctttacccaacacaaactttttactaaattaccacgaagttcaagtgaattgtcatactcacctgaaaccggaataaaatatggcattttgcttgctacacatttacttttttgacgcaaaatgctctcaacagcctctaacaactttccaattgaatcgtcaaacagcttatttttacattgattaagcaattcttctttatgacataccttccaatttccattcatcagctgcaaatactctgaattctgtgaaagcatagttcgcgcttttgcttcgaactcagaatattccattcctgatatctgttcaatcatcttacgatcaaattcattgtcctctttccatgctccaattaacgctattgtaggaataaacaaatctattgctgttatcggatcaggtggaagctgaataatattattttttgaaaataaatctcgtatatttctgtcaatattttctttactaacagatgctgccgcctgattgcattgacctgcatactccacaagccttgaccatacaagtataggattttcaggagaattacatttaattaacgatgcagacaatgcacgattaacactttctgcacaatccatatcaaatagcaataatatgaatgccttacagaatttccagacttcttcatttgttggttcacaacctttggctaaagaaatacattcttttatagcaactaacattttttgattatcgttattggaaaacaccggcacatctattctttccataaacgcttctgcatctatagctccaatagcttctacatgtaaaaaccttaaagattgctgtgctttgttcgaaatctgagccgtcactaaagcaattctatcgcgatcccgatcaaaatcttctttattaaaatcattccatgctgcacaaataacttcttgaaatgttttatccttttcagttgcagttatgctgtgctttatctgacatgccatttttccttctgactgatttctataagtaataacaaccagatcatctacatcatgtcctaaatgctttgcctggaagtgaactttctttgtttgctcattcatagccgggcagaaaccatctatcagcaatgacaaaagaaacattgcctgaatttgttgttcaaaatttactcctccacctccagtggaaaacgcattgctgattttactaattgaattttttgccatagaatactttccttgttaatctttacttttgtatattttttacgcaaaagtatttttcctgtttgataacatctcccatatacattggcattttttctaacaatgcatcaaacacaacttgtttccccttatcaattcccagtttatttccgatttgattcattgatcttccctcttggcctatacgaactattttttcaaaaaattgatttacagaaataattgctttatcccttaacatattatccagatgaaattccatcgctctctcatatgataatcttccattcttcacctcagcaaatatcaaatcactttctcctgaatatctccattttgaatatttctccatatcttcaataaactctacaaatctttgattactaaacgaccatttaacaccagctatttctgtaactacttttccatccgggtattcttcttctgtccaatatgctccatatcccggcaaataaaagtttatagaatgaccagttctaaaatgataatattctaaactattcagtatatcctttcctgacgctaaatctggtctcgttattaaaattgcaaccacatcatctgtaatgccatatttttcagaattcttttttatttcttttaacatttcttgataagttagtgcatcaaacatttttctatctccatttaaactacttattttaaatttttcaattgtcacatagaagaatttttctaatttttcccggatattttctctttatctatataatatttcaattttcctgccgagtacttttaataccttctaattctcatataaaaatacagcactatatataatatcttacctgtaccttccttaaatttcaggtacatatttacaaatatcttataataattcttctttatcaatcatctcggatccatcaagattagttttctgagaccatataatatcttctatcaccgaaacacactcatcactatttgttaaaatttcttttccccaaaatcgaacgactgtccatcccataaacgataatctcttattaatttcatcatctcgctgcctattacggcttatcttttttatccaatattcagaattattacttttttccaatcgagacttcaaagcatcccaatcctttccatgaaaaaactcactatcacaaaaaatagcaatcttatatttagacagtacaatatcaggcttaccaggaagcttatttacattttttctatatcgatatcctttattccataatttttttcttagcttaagttcaattaacgtatctttgttttttatatgttgcatattttttcgtcgttgtttagcagttaaattatccaatatataattcatctccctaatttcggaaataacattatgtagttcaaatcagtatttcatatcaatatatcctctgccaatcctaaaaaaatacttgcattatcaaaataatatttttgttcttaaacattcacaagactttctattcatttaaataattattcatttatatcttataatggatataacattttccagatcctcataaatttaattatctctattggtacttgtgaaaacctttcgcttgaccattatattcttctaattaattattttaatttgatccgtatggtgttttatcttctgctgccatattgatatttttatagtatccggttgcttttactaatgatccagaagtcttaaataatccatatatatgtgtttgatgataatgtaagttattaatatccggtctaaaaaaagcattttcaggaatatacaatgatttattattgtactgttgcaaataatcactttccacgtctggatgaacaattactttaaagtcatcaccaatagtaaacattcctttatcaaatgcccaatgcatatctctgcacaatgcaattccattgcttggcaaatataaccccttatgggatcttggccaaatatgtgctgcttcaagattcatgaatgatttatactgaattacattacctgttatcgcacatttctgtttatatccagtcataacaaaatctctaaatgatacagaattaaatagactagccatttcatctatatccccagactgtgcctttgctgttactgtatcttcgattactgtatccatttcattaaaattatttacacataattgattaattttattctctacttctgtaattatcccctgataaattgcatgtccatttcccctaatattagattcatcaacaagctttttgcacatcctatacagttctgagttcttatcgcaacatctatataagaaaaaaacattcgcttcttcaaccgccgcttctggcacatcattacttcctaatatatcttttgggagacttgatgtcttttcagctctgaaaatcaatatatcatctggttgaaacaacaattgcttcccttcaagtgcaccattacaatatattctgtattcatttcttgtgcctcctgacacattatatttatcattatgataaatataattacaatatattttttttgcaaccttttgatacaatggaattattggaattattgatgaatcatttgtaactgttttggaaagaggcggaaaaatatccaatacatttttatcttttgaaatatagatatacctacctctctgtgctttaccgttttttacgcttcctaattcttgatgaccaagacgtttaagataatatttcattgtttttcctttctaattttcttgaatcaaatgataaatggcataagcaactttttttgcaaataatggaggtactgcatttccaatcatcttaaaagcgtccgtctgactacaattaaaataataatcgtcaggaaatgtttgaagtcttgctgcctcacgcacagtgattgttcgtgcttgctctggatctggatgaatatgcctaagaccatccttaaataaatgtgctggaattaaattactaggctcatcccatctaaggacataatacttatgtacatttgacgttttacctgttaatttcgtataaagtgtcttcaaagatttagcactcgtatatttcatccttccagatgcaatatcctcctctaggaacttgaacaattcaatatctcgcttattatgaaaacgcgatatatgtccatttattaaaggatctgatactgaatgtgatagcttacgccccaaataagaaataggttcgtccaaaggtctaagtttaggcaaatcaccaatggcatcccttacagttgctttcttttctattttatattctggcaaatatgaagaataaaatttttcaaccattgcttcagccttgtccccataatgctcttttgatacacctaaaataataatacgttttctattttgaggtactccgtattctgtcatatcaataattgcattgctcagatcaggtaatactgcatatcctgcatcggcaaaggctttttgaataagatctataattctcacagatccatcacccggttttgcagataaaattccaggaacattctcaaatacaaataccctcggtttataatgctgaacaactttaagatatgactcaaataaataattacgatagtcttctctcattccgtgctcatcacgtattctaccagctaccgaataagcctgacatggcggtcctcctataattacatctagctgccggtttccaactaaagcatcaagacctttagactcaccaaatttcttatctttccaaccattaaataattcctctgttctctgaatatcaaactgaagaactctttcttccgaatcttgtattccccatctatttttaagatgattacgaagttctttaactggtgagggttcccattctacagctccaatcattttgtattttcttgattgttcaaatccttctgataaccctccacaaccaacaaataaatctattgtattaagcattagttttgctcctctcaataatttttaatagttcttctgctaatgcttgacctaaaagtggcggaaccgcatttcctacttgtcgttcttgttttgttctacttcctttaaatacaaaattatctggaaacgattgaattcttgcactttcgcgaacagtcggaaccctattcaattcataatgaaacaagtttctatgaccagtatctactgtcctagcaggcgcattcccatcaagtcttgtccacgccatatgaaaattcctactatttcctactccttctggaagatctttataatttcctccttctgggactaatgctattgtatcttttacaaactgcttatgatttgttgcaatatgattataaagaatagagcagccatctctcattaaaacttgatattctgtttctgccggttttacatattcatcctcatttttccccaaattatttgttcttgtaggtaaatccgaaattgcatctctacaagttctatatggtttttttgtttccggtccaaatgttggatcaggaaaatgtggatttccaatatcttttcttacacccatgaatacaagccttttccgcatttgtggcacaccataatcacatgccttaagaattcgacagtcaatattatatcccatttttctaaaacgcttcaaaacttcatctttgacctgacctttatacatgttcgccattcctggaacgttttcgataataaaaccctttggattatattgtttaaccatctcaataactgcaagataaagtttattccttggatcatcgaaatttcttggtcctgtcaatgaaaatccctgacagggtggtcccgcaattaccacatctatttttctgtctccagcagtttttaatatcaaatcaaatgtttctcgtttggacaaatctgcatttaatcctatagcacctttatgattaaattcaaatgtatctaaagcagcctgttcattatctacaccaacaataatattaaatcctgcttgttgaaaccctagagataatccacccgctccgcaaaaaagatcaatggcattaaattttttcatatatttatttactccttactattctgatttatatccataatgtcatcaatcgtacaatcaagaactcgacatactttttcaagtgtttcaactggaactgattcatcttttcccagtttagccatagcattgcttgtgatttttgctgcttctcgaagttgcgttttattcattttcttatcaatcatcaacttccataatttattatatgatctattcattttttcctcccaaaaagttcatttattatatagccgaattatagtatcatatgttatgtaatttttcaatatttcgttgaagcattcaatcggtcttaaaataacttttttaattcaccatccacatgcctgcatatcaatttttcaaaagtcaataataggattttgtgcatgaatataatttattatttaaagtgcttttatccgcttactcatctattctaatattcttatgaaaaagatcattaatggccttcttaattttcacatcttcaactccataaaattttaattgcattgcatataatatcaactcaagataaatcaaatccagtaatgccagttcatcaaaatccttatccagatttccatgtgcaaaattattacgttgagcggccagtcgctctcccatttcagaatattttaacttcttaccatttaatgcatataaatgctttccaaaaatatctataatgtttccaagttccattccaacaaaagtaagtttgctcgataacggatcatttcccacacatttctttaaatattttaaaatgcttttaatttctccagtattattctcaattaatggcgtcaataattgtacaactgtttcttctgctttaattttcttttccttcttttttattccttctggaaaaatcctacgaaattcccactcaaatgctgctgtaatcattacaaatcttgcggcatctatgtgatgtccttcttcataattttgcggtaaatgtcttaaatatatgctatcttctgctattgactgaagtattgaacctaccgcccccgtaatgtaactctgtcttatataacacccctttttcaacacttcttcttcagaattatgttcttccaaatcttccaaaacatataattctccactctttatatgtttatatcctttataagatgtcgacaattccactttagaaaagaaaacattttttcgataacataaatactgtataaagcgttttgctatcacccataaatgataaataaatgcatagtcttctgtactatcaaattcaaaacataatgatgaatttaactttaatggcgtttctgttacaccactactaaatgtccttgatgcaccaaatgttacttttacaatctttgaattatattcaaatgtttctgcctctgtagtaacagcagaaaactcatttgttcttaattgaactattcccttttcaataaaatcttcatcatattcaaagcaaaacgattgccctattgaatgaatacaattaatttccggacttgaaaaacacattttattaattgaacattctccatatttcaacacgaaaaatgcgataacttcgatacgtagcacagaattatatcttccaatatatgtaccttcttgtgtaataaataccattttgtttccatcttcattacacactcccaccagaaatggccgttccatctgcggatgatctcctcctgcgtatacgccttcgcctattttatgcataaaccattcatgttcaatttcctttttcttatcttttggcggaatcaaccgtaattcttgtttgtcaaaaacaaatgaaaagttaattcctttatattccaaaacgcctgtataaatatctaactcgattattatcacctcttattttcatcacatataaaaatttatcattttgtaatttttatagcaattatagatctattaccttttatgacaagtccaaatttttcaatttcatgccttcaaatatattttcaatttacggtactatctattaagatagtaccgtaaatcctatttttttagccttatccacaaatttctctttaaaattcataattttgtttttttcaactataataattaaattttttcttgctcgcgaacatcctacataaaataatttatacgcagttaatatcccttcaatttctgtaattttaaaaatcttctgtacatttttgacattgggtttctttaaatacgcaataaaatcttctttgcataatgcttcaaataacaaattcccttgatatttttctaaaacttgcttactatatttactcaatatagttttattcttttcatttttattatgtgtttcagctgtgagcttactaactttcattccaagttctttttctacttcttctattatctttttatacgaataaaacagttcttcaaattgcggaagagaaaattctaactcagaccataactcaaaaaaaggatacattctcacattcggagtattcccgttatcagaagctacgaaaattacagaagtatgactttctccttttacaccatgctgtgtagatatgtgaggcatactcagataattcgccaaattactaacttctttcatttctatatctaatactttctgatattctatattttcttcgaaatcattttttactttctctggtataaatccattatcaaacagactttctattacctcccgaatcaggcatccatctttttcgtatatctctataattttatcaaatttattctttatacttttcttatccgcatgcttttttattttaaattgcgatgaatcaaaatatttattttctttcttgcaaattgaaataaccataccataatttttatctatataaagacctattacattattcaataaaaataaaaatttcatcaatatatccggattatcatttgacatatctgacaaaatatctgttggagaatattttctcccaaatgtatatgcttccatgcctcgatatgcatcatataagttttttgcaccaatttcctcatatttttctttgttcatcaaatacaatactaatattttagggaacttattttgtaatttatatatactctctggtacatttgaagaaataatcacgtgcggctctatatccggaactacattagcattactttctgttggttgttgttcaaatgaggaatcattataaatattatttaaaattgatacaattttacctattgaacggaaattaacttcaagtcggtcagaagtatcaaactcttttagttttccttcaaatgagccatcataatttctatatatttgctgcattcggtctccaaataaatatatttgtacattttctctattttttaccgcatcataaaaaatatcaagtacataacttgatgtatcttggtattcatcaataaaaatgtagttatatttatctccaatctttttcaataaaaccggatatctttttattaacttacttgcaaacataagcagatcatcatgagataatttaccagtatacaaagatgtaaatggtgtttctccatacgatatttctaataaattctcacgaacagctttctcagtcagtttcccgtatttttcagtataatactgattactttgcttgatatgctcatcatttgtaacgtttgctattctctcattaattttttctgcatatatctcacaatataaatccagtacttctttatgagaataaaacggacttatcaaatcattgatataggaatgaatcgtacttactgtaatattagcattttccaaatctttcttaagctcgtctgccgcccgattagtatatgtaatacataaaattctactttctggtttattaatacaaatgctttttagttgattacgtatatatgtagtttttccactccccgctggagcatttattaaatgtttattattcttctttatttcatcagccataataatcctttctttatataatctggaagcattttctcttcattctcactcaaaatcacagaatacatgaaatccgttttgttattagatgttgcttctacaattttgcgaatagaatattcgctgtccttttctccctttttattattaggtatggaaaatataaggttcttatcctttcttatttttttccactcacttctttttatcatatgaaatacattgaaccctaatatttttttcagcatagcttcttccaaagttcgtgcagtactatcttcatcttgaaaagccagatatacccgcccatcacataatatattctcctctttaacctgaaaatcatataattctttaatggtagggaaatagttttcctctttatttggataaactaatctataacaatgatttattgttgcattcgtgctttttgaatcttccgctttcactttgtccatactcagaatttctttgtcataatccaaatctgttattatcaaagttttcattttgagcattctaagcatcggtagataattgtgagcatatgcacctccaacttgaatatatgctatatagctatcattcaaagttgaaaattctggtaatttaattagttttctaatatataaacgttctgaatccccttcatataaaatagctttatctgcaaaaatcaattccgaatatcctatttcaaaaaaccaatcaaaaaaatttgtcaaaagaaattctgattcatcatcaagattctctatttttttctcttttattgaagttctaaatttacttaaatcaaatagctcacttttggatttttcagtttgcctaattactctaaggctatcaagaccaaccacccttgcaatttcattagaatgtgttgtaataagtccctgtaattttttgtcaatataatagtttttaagaaatctaacaaatacattttgcatttgaggatgcatatgggactcaggttcctctataaaaaatacatttactttgttcttatcaatagacttatagaattcctcaagcctcatatgcagataaattaaattgctaaatcctaatccttgagactcttcatttaataacaatccttcaacatcatattttgctctggtaattcgtcgaataaactcctcaacatcttgttctttaacatccatttccaattgaagttttccaatatgtcccccactagtttttgaaatgtcccgtattgtatcatcgagagatttaatagatgaatttttaatttctttttttgctccagaatcttctatatcggccattaacaaatctggaagtttttttgttgcttcaacccatgtatcattatctttcagtaaagcaataacccttttactgattcctttcgaagaatccgattcattatcatccaattcgcgcattgcaggtatattttgaaaattgaataaacttttaaacgcagctacttccatcaagttttcatttttataatttgaattgcaaaagtaacatttttcaataactgcattgcagtatattctaagtaattcctcttttaaaaaataaaacttagtttctttctcaatacaacctggatttgcaatatctctaacccgtgccgccatcctgtcataacgctcatttaatcctttttcaaaagctgttatacttggctcatatgtataaataaagtagaacgaatgcttagtatcatctaagtccataagataatctgcaaaatattgaatattatcattatccggatcataatctacttgaatctgcgcttgaaagttatccatagtataatcattgctaaacttattgttatctgtcatctcatcgataatcttttgaacacctttttctttatcatactcaagcatgattttttgaaaaacaggtacagttttatccaaccacattgatgataaactaatcggaatatcactatagctaaaccccagtttcttgtcgcaaaacattccttttaatacagaaatcaatgtcgtttttccactgttgttcggtccggccaacacagtcaacgaatcttgcatatccaattcaacactctgcaattgtctataattcattattttaattttttttaaaatcatataattaatcctccggtaaatcatcaaattttaataaaaattaccttgtacaaaaacttcctgatatctttgttataatctggtttaatcttcaatattcaactcacctttattcttctaattacattctccgtattttccaattttgcttattcttccctggtaattaagtatgccgcctctataataactcccctcattttctatcttgaatataatgatttaatatttcgaactgtctagcctctatactcgttttattattacatttaattttgatttctatttcacacttaaagtaattattcttatttcgatttagatattcctttaatgcaacaagttctttaataagataatcattcttcacgcaaaaccaccgacataaaaaattacatctattttccaaaccatcgttgcttttattttggcatccttctccacaaatcaatgtaatttcctggcgtgatatattgccgatttgtacttttcgacacggattttcgcattcaatcgtggacatttgggaaatatctaccggtatttctaaaatcaatttttctgttatcgtttgaggagtcaatactccctcaatattttctaagctttcttcggtttcttttaaattatctgtccctgaagattttgacgaaccaatttcatattttgttcgcaatttatacccctgtgttaacaaatgcgaaatccaatgaaatgctgattcctccgacatttgttccatattatgatagagaattggtttcgacaccctgtagctgctcatatccaacaaatctgcaagtcgaagaagtattttatcaaattttatactcataagccgacttgaagcattcgattttatactataaatatttctttcatctgcaccatgtgcttctgaaacttctgctaccaattcacgcatcggcatatccaaatattttatttcagccctctgtcttatttcagatgaactgtcaattgcatgtcttctgcgaatcttcttttcaaaatactcatccaattttttataactctcaagcatatatttttttacgcttaaaatatccagttcatcttcataaagattttgattctcttttatttcattttctgttaccttttcttccaaattatccttttgaagttctttattaaactcgtctaacaattcttgtgctaattcatctgcttcattcgtatcagtcaaaaaactatccaaagccggaatctttaccatggaaatatcatgcagatagcaagccagaaacaaaatataataatcaattgcagaaattttcaaaaaatcaattgcatgaattaattttacaatattttgaattaatacaattgcatgttcctgattatgcaatgtataaaaatacaaatgctttgatccattcttccagacatcacaagtatatttatgtgtaattatcaacttatcgattgaaaccggatcttttacaaaagaatgataaatttctaataccttcataatagagtaatctgcggtatctttgttttgcttatcatcaagtaatatttccctttttctgaactcttctatagtaaataaagaattacgaacaaacgataaaattctaagttctccatatgttaatgcctttttactattttgggctaaaaccggatgattagatacctcgacattaaacaaatacgaacaaacagtattcaataccattctaataattttttgtgtacttgcacatacaattctcaatcttgatggaagtttctcgttttctgacaaaagtattttaagaatctcttcatctgtttttttcaataatttagaactataatcttctgccacttcgtaatgcttatttgcatacctttttaatctcacccttgctaaatattttaaagttttatatggatcattgtatatatcccttaaatcttcttctgtcatatatctttttaatgtctcttcaaatatatcttcttcaaccgaataatcattctcttcttcatttctcaacaaatctctatatgtacattctaaataagaaaattctactgatgctttcccataacaaagctcatttatttttaatatgtaattctttaacacattctgctctttatcatctgcaaatgtctgatacattccaattgcagcatcccatatatccgctccgtaagaattcataaatgcctgcaatattttctcatcatcctccatatcttcttccgaaagttctgaataaataatcttttccaattctttcttgtaatcttcatctgatccattctccggttgatgcatagcaacaagtctttgttttctgtattcaaaaaatctataatatcttgtaagtcttttttcaaatttttgcgtatcatcctcatctttttctatcgcatcttcattcccactgtctcttttctgacttttctcctctactaactgatcccgttttgcttttacttgtttagataaaacatctaatttttcctctaagttcctattctcttcatctgagtacattctgaaaaaatcacttccggcctgagacatttcacgacttatacacttcaaatacacttcactgtcatccagattatctaaacgtgtgtaattactttttccgtctaaatgtacattaactccataaagatcactcttataaaatttttctgttccctcgggataaattgcactatcttcttcaaaattgttagcttcatctgcaatttgtttattaagttcttttaattgctccttaaaattatcttccctcacatcatttgtaaaaataacagaatcatctacgtaaaaataacttactccagtaaatttttttctgaaaatctcagcaatagatatcatgtatatatttccaaggaaatatgattgtggtagtccttgcggaatcccccttacaaatttatctgatttttccttaaaagcccaacattccttttcattttgttctattttatccacattgtcataattgccagccccctttgttactttatagtattgtcctgctgttttttcatcaaatgttgtagtaagcttacaaaataaaagcttttgcaatactcttttcatcatctttctttcttcatcattcaaatatgcaggaagatgattgataatataacggtaaataattatcgggttaattgttggaaaaaaattctccaaatccaatgtcacttcatatttatattctaacgaagtatgatatttcattaacgcatcattactgttctgattatatttttgatactgctgcttccatggtttaaataaatattctggcttcacagaaactctgtttccataaaagtcagatggtattaaccggcttaaatttgaaagccgcaatttgggatctccttcctcttcttcaggtatttcataaacaaataaatgaagcatcgatacgattgctatctgagtaattaaaccggtactatgaagtggtctaaattccaattctccattttcagataatttcttgggtttaaaataaacttttgcttcaatatatttatccttatcaaataactctataatttgttctcttactcgtgtaatcactccattaataagtcttgcatcaaatttgtcctgtaaccgatgatataagatacgatcttctgtatttaagagattatattcaaatacatacgaattcaaagaatatatagaaagatatatattttcatcagacaataaaaatctgccacatttagttttttcaatttcttcttttgttatcctgctcattttttagactcctctttgtcttttgatgaatgcttttctaaaaacgcttttaaatcctcatgcactttttttaagctttcatctccaaaaataatcatctcatttcttcgaaaagtataacgttttaaattatataaaatgctacattctatcatcatttctttttcacagatataatccacaccacttaaagtggatttcttaatctttcccttttcatctactgtcatcatccaatatctgtcaattttcaaagtgacattataatatttttctgctacatcaaataatttttctacaattttatatttcttattaaacgcacataaaaaattccagaaatcatccttgaattgtggtaagaatgttgcattatacacataatcttgattcacatggctcaaatataatgaaaaacatttaatttcctcttcaaacaactcccgcatttcctctttagaagacaatttatcatataatttgcaaaacgtttcccatctctctttatcatcattattattcatagctagtctccaaattaaaatattttatttttcccgttctccataccacatatcagaatatataagttttaaataactgtgtaaattatttttccactccacatattcatgataatcttctttccacatattattattcatatgttctaaacataaaaccgccttatctttttcatccagtatcttatttaataattcttctctggaagacgttatggcatttcgataatctggaaactcctccatcttcagcagatacttacccacaggtggttgtccgtacatatccctgatatggttatcctttgttgttaactctatttcgcttacatttaaagaaaggaatggtggaaataaaacttctttttcatcatagttgcaatactcttgcattgttataacctgttggtaatccacatatggggtattttctaaactttctatctccaaaagtattatattgtttttactagcaaactcatcatcatattccccattagtacaagacacaaacgattctgtatgacccttaaggtacgccattaatgatgcttttcgatctactcttttgactttcgaaaccgacaactggtttcctttttttcgacacattactgcgaaaattcctctgtatatctcaagagtattttcaattaattctataaagactggatttagcttacgcttctctttatatatcctctctttttcattttcaattccatcaaacaacaaggcatttaatgtacgatacgcatctctatctccccataacacatcttctttattttttggatttaccagattattcgtaattacatattccccttctttatttttttggtgaatatccccaccataaaatctaagcatatcaatatcttttcttttttccatattatttagatctcctttttgtaaacatatcttttgtacttccaaactaatcaatctttttctatactgctttgataaaatttatatctaaccatatagatataccttacgtatataaatacacataacagtcaaaaagctgtcgctttttctcactttttctactatttttctagaaaattcactatatcaaaagctgacctttcccgtcagctttaatcttctccaccctgcctttaaatcttctcatacctccgccgataatactccaaactccgatacccaagcacatcccccatctgctcgccaaacgccatattcccaacaacttctccaatttcattcctcaacgccagcgcatatccatccttctccacaaagaatcctttccctgacgccttcaggaatcggatcggcatccgcttcgccttactcagatgctgcttatccgtcactttcttataatcctcataagtattcacattcgggaaatccttccacttcgtcccggtatcaaagaattccttccaactctccaacacctcttcatccgtaaccgcaagccggatatttccctgattgtaaaagctgtaaaggatcggcatcgtatatactttctgcatctccgtagtttcgatggtctgaatgaattctcgtccgattcccgcatataactcctgctcatccgctgacaattcaccaagttcatacaggaaatcaagataatgctggaatggatttcctttcgcatgactgccgctgacgcagcaccggtaaatatcatcatccatatacgtgaataaatccattctgctcggacgctttccgtccaacagtcctttcacacgataatattccttttggatctgcattttcagcgttaatttcttcttatctatttccttaaacagatcaatcagacgcatgtcaaaatcaacgatacagtcatccggatattctaaatcctgatactcacaggatcctttcttgttaaatgactgctctccgcttaacaacagcggtgccttccccgctttctcgtaatttccgatgaaatccaatacgttcagatattctttccctttatatagacgaagtcctcgtcccaactgctgcaggaatacgaccggggattccgtcggacgcaggaacattaccatatccagtgaagcgatatccatgccttcattgaacatatccacagagaagatcacccgaatctctccgttcttcaatttgcggatagcttcgttacgctcctcggcatatgctccattttcaccactgtatactgctgcggatgcgattcctctctgacagaattcttttgccatgtcttctgcatgctgtctggaacagcagaatccgattgcacgcaaagaacgatattttcgataatatttgtaaatcagatcatatcttctctcatttccgatataagcctgattcagctcctgctcatcataacgccccttcacgatccgcaatccggaataatccgtctcatcatacacgccgtaatagtgaaatggtacaagcattcctttgttgatcgcttcttttaaggaaatctgatatggcacgttataatcacagatttcgtagatattttttccgtccattctttccggtgttgctgttaatcccagtaaaaattgcggctgaaaatattctacgattctccggtattgatctgtaaccgcatgatggaattcatcaatgatcacatattcaaaataatctgccggaaaatatgtctcattcaaatattccgttcttccgagtgtcgctaccgatgcgaagataacggatttatccctatccttttcttttccgtcaaagaatccataatccgccgagttccgcacatttttgaaagaaaccaccgcctgcttaaggatttcttctctgtgtgcaacgaataacacccgtttatattttgccgaatcaaatgcagcaaggtatgtctttccgattccggtggccgcatatacaagtcctttcgccgcaccttccatgcggctttcctgtaacgcatatagtgcctctatctgtgctccccgcggacggtacaacattcggacattttcagcattcctgtcctctccatcttctgtagcgtcatatttcgccagatccttggacaccgccggcttcttccatgccttggaatatcgttttaattcttcatcatctataatgatcgaatggttcagaaacagatcttcaaatgtagcatagaacaattcataattctttttgtccagtgtatcactgaatctgtaattccattcgattcctgaagttaacgcacttttggaaatgttcgatgatccgatgtatatttcattcgaagattcataatgaaagatataagattttggatgaaatgagcgtgatgtttcattatacaggcgcagatccacacggtcaccgagctcgctcttgatcagatataaagccgacggctgtgtgatccccagataatttcctgtcaggatacggatcttcacgccccggtccaacgcccgcttcatatcatttaagagcatccgcacacctgactccatcagaaatgagacgatgatatcaatctgcttcgtcctctctgactcgtcagatttaacagcttatttcgaatctcattcgcatcatgaacggacacacaccttgcctgttgcaccgaatctaacatcagcttaatttcccagtcttccagcaaatgtttctccatataccatcctttatgtgaattttctgcctgcttaatcggataaccgcagctttgcaacaaacgcacatcgtcataaatggatgtacggtgtacattttccattccgtattcttcttccagtttctggcttacttgcacagcattcatcggtgttttttcatcagtagtctgaaaaagttgaaagactcggattaatttttctttatgaggtgtggacataggggtgctccttacattatgttttgaattgaaatgatatattaattatactgtactgagttaagcttcacaactttcatctttttgatttttatagttgacttttgttaacaagcaggttaatattatatataagaaatgggtttgttaccgtacggctattgcctaagcggggtgctcgtttcttgagtgtgtaaataattctgtgtaaactaaatacgtgatatgtatcctcttggattgatgttaaaataaatattaattcaggaggatatttttatggcaagaagaagaaaaatgacaccagaaagaagagagtttattaacggcttattggaacactatcaaccaaccgatgctcaagatgttcaagaaatgttgaaggatcttttgggagataccctgcaaggaatgctagaagcagaaatggatcagaaacttggctattcgaagtatgattatcaaaataaggagacagatgatagccggaacggttacagccataaaacggttacatcttcgatgggcgatattgatcttgatattccccgtgatcgcagaggtgaatttgaaccacagattgtaaaaaaacatcaaacagatatttctaacattgaagatcaagttctgtccatgtatgcaaagggaatgactaccagagacatatcaacacacctttctaatgtctatggggtggatgcatctgcagagatgatttctcacatgacagatcgcattcttccaattgccaaagaatggcagaatcgccctttggagaagaaatatgccatcgttttcatggatgccattcatttttatgtacgagaagataatagaacggtaaagaaagctgtatatgtagctataggtatcagactttctggtcaaaaagaagttttaggtatgtggattggcggtaatgaaagtgcaaaatactggcttggtgtactgaatgaaatcaaaaatagaggtgtggaagacatcatgattgtatctgttgatggactgactggttttgtggatgcaattcatgcagttttcccattagcggaaatccaaagatgtattgtacatcagattcgttattccactaagtttatttcctacaaagatatcagagccttcatgaaagacctgaaactggtttataaggcagatacagagcagcttgcattagaagcgttagatatgctggaagaaaattggggtggaaaatatccatcttcaatagcgtcctggcgtaataattggccgcaactttctacatatttcaaataccctggagagattaggaaactaatttataccacgaattccatagagaatttcaatcgtcaattaagaaaagtgacgaaatcaaaaaccatctttccgacagatgattcgctttttaagattctgtatcttgccatgaccgacatcacaaagaaatggactggaaaaacatgggattggggacagaccttggatcagctctgcatatattttggagacagaatccaaccagaagatctcgaatagaataaaaagcaactatgagtaagggtcaaaaacgcccgttttcagcgggcgttcttgacatgtctgcttattcatgctaaatagtaaataaggcttaaacagcaatcatgccattcaagcctaattcattttttttaacttaatgtaaatcattatgattttttcattaatctaagagatttacacaaaatattttacactctccgtttctttttttatattcaccatatcatataaatatagatttccatcggctgcatgccgaattaacatttctatcctgtatatattaaatcgttccacctcttttaaatcactactataaacaggtaatgcaaacctagttgtaaaacgatactagccatattttgcatcaactttatgcttccccttaaaattttcctgccatcgtttgttagttgcacatttcaataacgtaggaattttctgtgtcgcatttgctttggtttttgcattagcaccacacaatcgttttgtatcttcagatccttttaattcttccggaaaatcatttccaataaagacttgatccgctgtttcaacaacttcataacactttcctacatattccttcaaataattttcaacatcttcccaatcgatatttctcttccctttaaatcgtatatctgtaattacaactatttttcttccatcctcatctgtaattatgtcaataatattttccttcttcatatatattttatctctcctcacagttaacgcgttgcgttatattatcagtaaaaaaataagtcttacgacttatttttcatcatatattccacttccgcccgatatttcatcaaacgtaaaagatactccggaagttctctcttctcagcttcccaatcttgaacagtgcgatacggtataccataataatcactaaactctctcctgttcattcccattttttcccgtaattcttttacttcttttcctcgactcattaaatcaccttccagacgcattgcgttattaaaataataattcatgtataaatgtctgtcaatgactattttctatacctccggttcaatcacagcttatcatacttcgcactcttccccttagccttctccaccggatacttctttgcattcaccttgatcttctcccgcacgatctcatccagatccagtccgcaggcatctgccatcaagacacaataattcacaacatccgccagttcttctcttatcttttcctgttttccttcatttgagatatccgcaccgctccactggaatacttccagtagctctgctgcctccagcgaaatggagattgccagatctttcggattgtggaattgtttccagtctctgtcatctctgaattttagtatttctttaattgtttcttctgtcatcttagttttcctcttcgatatatttactaaagtattctcttaattcatcatcgcatacatacaaatatgttcctttgattcctctggtcatcagcacataatacacatttgtgatgtattctttcagttcttcatatgatgccgttattttaccatttttatcaaaataacattctgaccggataatgatctgtcctgttgttttatcatatccaatatcatttccgagaataacaaacgcatagttcagatcataaccttgaatggaatgaatacatcccacctcatcgattgcttctcctgtatgaacccatccttctgtacaatgattccacattcgttttacaccttgtatctctatgtcctttttgctccggtcatttttactgatccatggccatgcatatcctgctaccattcgggaaagccctgtttcttcctctttgacatacatatctttctcaaattttgaaaaatcagagtataatttcaaatcatattttttcgaatgatacttccggtcagcgactccggccaatagatcctttatgaatgcaatatagtcattgcctccctgcaccctcatctgcgtcgcaagggtgaaatacgatatcgtatgttttttatatggatttctcattttttcttcgaaccgctcataatcaatgcccgacggaccaaccacctgattgtaatcgtagaataacactgcacactttgattgttctaatatccagtctaattcgtctgcatccgtcgtcatgcccagccgttcacagctttttttgaaagctcccctataggaaatatttttatattgatgaagtctgtgtgcttcatcgaccagtaagatatcatattttttcttcgtaatatcagacggggacagtacctgtgatggcgtcaatccataaatacttcggaagatgaacttcatcgtctttctgagcgaagtcagtcggtcattttttgcggacagttcatacatgctatccttttctgttctctgctcctgcgtttgctctcgtttgatttctccctccgtatcttcttggcacaagcaggacaataccttgatgcaccagagcccgggacatattcaacgccgcacaccgtacaatttttagcgggcattgctgcccaccgttttgtaggtatgatatgtaattcatcgacaaagccgatgaatttatagtaaatcttgatttcctgcttcactgttccgtctgccatcttctcacgctccgaaacaagtatcttgtctatgagtgcgtttataactgttgcatccagttcttttaagccttgataatttcggataagggcgaggaagtcacggattccccgtgatttctcgtagctttcattaagagtttccgtcacctctttcagccttgcttcaatttcaagctgctctttctggtatttccccgacatcatctcaaaattccgctcggtaatacgctccatgaccttatcctcgtagagagaggaaaacagcctgtccagttccgcaaggcgtttgttcagcttcttacgttctttctctaatgctttcgccctgctctggtctgtttccgtgagccgcttttctatggccctgaccgccttttcatcattcactgccatatccgcaaaacagttgatgtcggcaagaacggcattgaataaatcccttgcttctatattgtgggcactacactcgcttcttccgtttcttgcataattattacatgaatactgtacacagtcgataatctctgggcgtttcctcctgtgtacgttcattgcccgcagagcacatccgcagtccacacacttgataacgcctgcaaaaatatttacaaatcctcccttgttctgtggaagcctacgacttgtaataagctgttggacaatatcaaattcctcctgcgtgactattccctcatgggtattgggtatcacttcccattcttcgggcagcttagaggggcgtttcttgcttttcatattggcggcaatccgtttgtagcctacaagatttcccgcatatatcgggcttcttaaaatgctcctcacgctgttcccactccaaatatagcgtttgtcctcgttcccctcaaaatgacgttcaaagcctgtttcgccacgctccgccgcataagcggcagggcgtaggatatgctgtttattaagatgtctgcaaattttggcaactccattcccttttaatgcaaggtcgaatatctcttttacaacatgtgccactttatcatctatcagcagatggttgtggtcggcagggtctttgatatagccataaggggcggtagttcccatgaatttcccctgttgaaacctcgcccgatatgccgattttatcttaacagatatgtcagcggcatacatttcgtttaaaatgttgcggaaaggcgtgatgtccatagcagatttattcaaggtatctacgccgtcattgaccgctatatacctcacgttatgctctgggaagaaaacttccagatataacccacaatcaagatagtttctccccagacgggataaatctttcgtaatcacgcagtttatcagaccgctttcaatgtcttttatcatattctggaaacttggtctttggaaatttgtaccagaataaccatcgtccacatacgtttttgctatgtgccatccctgctttttcacataatccgtgaggatggatttctgtgtcgcaatgctcgcactctcgttatccgtaccatcgtctttagataagcggcaataaatgccgactaaatagattttcttttcttctttgattcctgccatactgtaaaacctccgtatctgtcctatctgttttcatgtcccattgcgtacattctaagcggacagcccctcattgtcgaaggtgtcgccctcggcaatcttcttccgaatatcctcggagataatcgggacaaacgcttctgtaacggtctgtgtgccgacatattcacggctgattatcatctgcactggtgcttttggcacgatacgctttctctttttatctgctttcttatcctcgcccatacttaaatcttcctttccagacagggcagggaagagtttggaaatgtccccgccctgccaatcagataccattaatcctcgctgtttaattctttctgtaatgctttaaggagtgccgccgcttcatcagcgttcagcgtgattcccttgccgcacttttcacggttcggggaaaagctgcggatgtcatacttcggctctttcccattccatgaaatgagattgatttcctttgtgtagccactgtcgcccgtagacaatactgcgatttcctttacgatttcatactggatttctctcattctccatacctcaactctctgtatttacttcccgaaaaaagaagattagcggctgtcacggttgcgtttcctctgcaactcacgctccaaaagtttgatgatggtttcctccatctgcttcggcgttgtgttcttcggaaagtattttttcagcttgcttgtgttgattttcaaggtttctttctggttgcccttttcctccgtcataatcgcaaatatcgtatccatgtcaagccgcccgctctggcttaactgtttcatccgctgtgcctgtgagagtgagggcgttgcttcttcgctctccatcgtggcaaagaggttttcctgctcgtctttcttcaagaaggacagttccaccgcaggcgtgagggcgattttcccctcgtccaccatctgcaaaatcggcggtatcagttccgtcaggcggataaaacgctgcacggtcatcctgcccacgccgaagccctgtgccaccttgtcgtccgtccgcaacttcgtcacaacttgtgacgaggttaagtctgtgcggaaaccctgccgcttcatggcttcggatttcatcttgtaagcaaacgcccgctccgatggcaggatattctcacgctgcaaattgctgtctacaagggtgatgatggctcggtcacggtctaagggcaggacaaacgcaggcacggtatttatccctgcaagttcagaagcacggacacgccgctgtcctgcaatcacttcataaccgtccccgtcctctttcgggcgtgtgattatcggcgtgacaatgccaaattccttgatgctttccgctaactctgacagtgtttcatcttctgccacatgaaacggattgtcggggaacgggtacaagtctttggtctttaacaccttaaaatcctgtttcttcattcacatatctacctttctttcgctctgcttctatgatttttctgcaattcttccaacacttcgggcggtatttttgacagcagccgccccatctgctcgttggttctctgcaattcaaatatcttctgattcgctttctgcacctttagttcctgctcgtacttttcatcacgcatacgccccgcatagtctgattcctgcccaattctctctttcaaactgtcgatatacgcctgctgtttcccgatttccttagagaatttctccacgtctggcagccatgcagagagtaaatctaacgctttatcccttttcttccctgcgttaaaggcgttgatgtcggatagggcagacacgatttcttcatactgtttatcaagcctgccgcctaatttatagagccatgtggggacgtgtttccgcttggtttccattgaggactgcccccgttcaagctgattccaccgtgaggacatccgctcatggtaggcggtctgccactcggataatgatttctggttgcctaagatagctttcgctgacagcttattgtctggcgtaatcggcacaaagcagaggtgcatatggggcgttctctcgtccatatggacgacagcggagaggatattctgctttccaacacgctccgaaatgaagtcaagagccgtctggaaatacgctttttgttcttcgggcggtaactggttcataaattctggtgaagctgtgatgagcgtttccaccatcatcacgctgtctttccttgtcctgcaccccgcttcggctaccatgcggttaatctctttcttgtaggtgtactttggtggtgctatgagatggtaattgtttttagagcgttccatatctatatctgggttgcttttgtaggcttctttcttccgctcgttgtggcgttcacaagccgcaacgccgcccgcttttcgtttctggaaacgcaggattgcataaggcataggcggattcctcctttctttcggcgggtgaccgtcctttggggtgacagcggtgacggtggtgacagcagttttgggataccccctgccgactgccgcaactgtcaccctcaccccctgcatgacggtcatgtcgatgatgacggtgtttttgggatacccccctcgcaagagccgtcaccgtcatgccgccattcttttatccgaagccgtaaggcgtaggatagcagggcacagccctgccttaagggagtccagagggaacgtctggcacacgactttgcagggcaaagtgtagtgtgttacaccctgtaaacgcagtcggaaaaatcggaatgatttttctgaccgcaggggtggttttacacgaccgaaaagggcgagtaaatctcacgcctgcattttgcgtttacggggtgttctcccgtagggatgacagcggcagggtatcctaaaatcactgtcaccaccgtcactgctgtcacccgcagggcagagccgccagctttacatggctttaagcgtcaatgacagtaacaggggggtatcctaatatcgctgtcaccaccatcaccgctgtcacccgccctccttgcaagggcaatccgcctgccgtctttcctgcggctgtactggtagcagatacggttctcgcttaaaaatgtggtgcggtattcattcagccatttcgtaatcaccgtgggtatggtttccgtttcccccatagcggctaacagttccgttgccgtgcctatccattcttccttatccctcataaaatccaccaaccgaaaaaggacatctggtatcgtttctttcgcaagctgctcctgcgttttccgctccacaagctcccaacggcaatcacggaaacgcagcgtgtattcctgataaggcgtgtccctgcccgtcacatacagcttggcggtgtcagacgcacgtttctccttttccagaacaaaggtagcgtccgcactccccgttaatcctgtcgtcccagacaccttgttgaacacgtcgctgtcattctgctttcggatgtggtgtacgacaatgaccgccagagagtgcctgtcggcaaagtctttgatgagggagatgtccccatagtcgcttgcataggcattgtcttttgaagctgtacggactttctgcaaggtatcaatgacaatgagcctgctgtctgggtaatctttcagataatcttcaagctgcacgataagaccgtctgacagcttgcagcttgccacggcaaagtggagccgcccgcttgcttcgtccgtcaaacgaaataacctgtcctgtatgcggcagaacgtgtcctcaaggcagaggtaaagcacatcgccctccattgtcggcatatcccataaagggattccctgcgacacgcataagcatagcttcagcatgagccagcttttgcctatcttctgtgagccgcagaacagcgataagcctgtcgggataaggctgtccaccacaaaggatggtttctcaagcggttcataaaggagcgtttcggcgttgactgtctgtaacttctgcatggctttcctcctttcgggcggtgtctttgttttcgttgcacataggcgttgacctccttaaaaatagatttactcccacggaaaaaagtgagagtatgtaatgccgccaatcccacacaaataaaaaacagatttctttttcgggcggtgtcggtcacggttggagatatttcttcaatttccgcctttactttctcctttgcaatcgcaacagatttctgtattgccgaagcggtgcaatgctccatagcggcgatttggtaaaaattgaactcatactcgtagtagagcaggaaacgccgcctttgtatctctggaaggctcccaaccgccttatagagcgtttcattccgttcttcctcaaccatgcgttcatcaaggctcttaggcacacgcaacgcccgtctgtaaagggtttcgtcccatacctcgttaaactccctgtgccgctcgtcccattagaaaagattcctgttcctgcgctccatctgccgaaactccataaagaactgttccgacacttccaactcgtgggatttgccctgcccgtccttaaagctgataaaataccttgtgccgctttccgtggattcctcccgaagcgtgtatgccttaaccctgtatgccatcctgttgtcctcctgcaaaaaatgagtgaggggatttccatccctcacccagtagcccgcaggatggcaggctgttttagaagctataaaattttccgcagcttcttccgcagatggtctaacctcgcatagatggcaccagtcgtcaaatgcacaagcggggcaatctcctttgtggaatacccctgcattttcagcaggacgattttcaaggtacgcccgtccaccgtgactaatacttgatagagattttcgctctcaatctcttccagtaactccgcaaccgtacccacttccgcctgccgctccctgcctgccatgtcctcaagatattccgcaacgtcattcgtccatcggtaaaaccgcctgttggaattgaagtctgccctgtccgccatgcgtatctgctcaatggtcgcttcatcaacgccgcactcacgcagcagcttttcctccgcttctttccagatacgccatttcctgtcctcccgtccgtggttgtatgccattcttacttcctccaatcagaattgattgagagggcagagaaaagccccctcatcttcccaaaggaaaaaacaagggggctgaacgccttaaattttaattttctattatctttcttagttttattaggattctggctttgcgtttgtttacaacgctctgggttatgcccaacctcgccccgacttcacgctcggaaagtccgtcaaaaaagattgcctgtatcagctcctgttcactatccgacagcaaaggcagggcggctttcagcctgtccaccatgaccgcattgacaacggtttctgcaatgtccaccgcttcatcagtgataaagtccagaggattcccctcgctgtccgtaaatccgtcgagagatagcagtctattctttgtatctaatttttgcagataacgccaccgttccttgtcacggtagaagtctgtgtattgctccctcacgacttcaagcagacagccttgaatggggataaacagcttgtccatataggtctggtcggattccctgcaacggcagaactccgtgtaggataattccacatagccgccactttctctgatatatacctttcttggtgcatatttcaccataaatacctcccatctgaatttttgaaatgtaaaaaatccagatggagaggcggagaacgacaccgcatatcagaaacagccctacggcactttccaacaaaaatcgacaaaagaaaaaccgcaaaggctctgtgacctttacggttataggaaatagtaattctattgtatggagattgtacttctactttcaaggtgagaagtaccgttgcactggcagaaatttttttaactggtttcctgccgttctctgatatgctatgtattgataaattttgcttcgtatgagcagatagataactgcccgaaaaaaggacataaaaaaatccctccaaatttaaaaacaaattcagagggtaatttagggtataacaaaataacccacccgaatatcgttttttttatttggtgagtttgttctttcaaatacgaaacaaaaagagccgatgattcgtgaattgttccacaatttcatcggctctgcgtcttaagcgtctggctctttgatgacagttatcttcaagttgtcaactttaatcaatctttcttgtctgcattttggacaataaaggggataattctccaaaacagtgtccttcctaattttattacgggttttgctcccacaaacaggacacaatatccattcgcatttcatcataattagtctctaatcctttcaaatctcattttatatgacttttgcaagctgttaagctaacttgtggaacatatgccgaaccttatctatacggctattcgggcggcggggttggcaaataaatttaccaatagctggctggtatccttttaactctgtcaagcagactccctgcccatttgtgaaataagttaaatcgttcctgtattcttgaatacatctagcagggatttctcctttcagaatgacctcgtcattctttatctgagtacttacaatatctgcacaataccttggagcatcatgatacgcccgtgagagatattcctgcggtgcataaatttcaaagtggagatatggctctaatagttctgtccctgctttttttaaagcctgctccaatacgataggggaaagcagccgaaagtctgcgggggtacttacaggactataatacaatccatattcaaaacagattttacagtctgtcactttccatccatacagcccctgctcgcagccataaagaaccccctccataaccgcattttggaacgattgatttaaatatccaagtgaaactctgctttcatactgcactccgcttccaatagggagcggctctatggacaacccgacagaagcccagaaaggatttggcgggacttctatgtggatggtatattctgcttttctaagcggtctttccatatatataacagtaggctcttttatttctgcctccacatgatatttttcctcaagaatggcacaaatgacttccatctgcacattccccaaaaaagaaagtataatctcatgcgttgtagtatccacataatattttaaaagagggtcgccatctgaaatttctgtaagtgccccaagcaatatttcccgctgttcaggtttctttactgcaatcgttgtttggagcatagggagaggattttcaataaattttctctgcggcaacagcatttcgttccccaaaatactgtttagctgcaaaacatcatttggtaaaattacaatatcaccagagcaggctgtatcggatggatataattcaccgtttgtcggaacacacatctctgtgatttttattttctctttttcagatattctaataacatccctcaaatgcaatgttccgctatatatacgcacataaacaaaacgccgccttttctctgaatattcaatcttaaaaacctgcccgcataattcagattgaccttcaggcgttgatgaataaaatttactggcaatcacttctataagctgccgaatccccagattgtttttagcgcttccgtgataaacgggaaataacgttccgttttggaatctcctgttttcttcctgttccagttctgacattttaaacggtttccctgacatatatttctctaatagttcatcgtttcccataattaccgcatcccactgttccatatcgtcattgtccgttacatttatatggggatgctgcccaaccttttgcttcactataatttccgaagaaagctttgctttcatttcccgatataccattggcaaatcaatcccctcttggtcaattttattgatgaaaaagattgtcggaatcttcattgtctgtagtgcatgaaacagtatacgggtctgtgcctgtatgccatcctttgcagaaactaataatactgctccgtctaaaacggataaagaacggtatacttccgccaaaaaatccatatggcctggcgtatctataatgttgacttttacatcctcccactgaaaagatgtcactgctgtctggatagtgattcccctttgacgctccaaattcattgtatctgtccttgttgtgccttcatctacgctccctagttctgcaattgcaccactggtatataataaactttccgttaatgttgtctttcctgcgtcaacgtgagccagaatgcctaagttaattattttcatgtgattttcctcctatcaacacccaaaaaagggcataaaaatacccagtgataaatactcctatcactgggtaaataactccaatagccccaaaacacttatatgttttcgggcatataaaattacatgataaaagtattcttaaactgggtacaaaaaactaagccccatattaaaagtgaaacgggactgctactttttgttcccactatcaaattgacagtttatttaagaataccttgccgcatatttattaactccttgtataatactgaatctaattatattccttaaccctttatttgtcaagctgacaaactaaagcagaaaaagcggcaggatttccccctgccactaatcatctgtttatgcaaaaataatttccttttccacaatctccctcgcacaagcccttatgttattgaggcatcctgtccattctaaggcgttttctgcctttagctgttccgttatgccctgtgcctgtttcataccctctatgagcctttcaaagcgttcctgtgcctgtctgttgatgtcggcaaggtaggcgtttagcctgccgcttgtaagaagattggtgtatgtaactttacggtactgttttagataatctaaatgccgttgcccccagatgcctattgcctgttcttcttcggcgggtacagttaagcacggtatcaaataatccccttgcctttcgtatttgccgcccagttcctcaaataatgattttgccattgtctgttacctccacattcttttttattttgaatgtccgcaaaatccgtcctacatctgtggcacaacgaatccaatctttttcccggcaaactcttcactgtctgccaggtatttcataagatataccgccacaattgtcttaccgcttcctggcattccatttaccactacacgattcacatttccactctcaatctgcgcaagtatatcttctactgctttccgctggctgtcgttcaattctttatatggagaatatttgaatagatctgaattttcaatttcttccagcgaatgtttgaccagtttttcttgttgcagcttacgccaaagcagttcgaattttttatcatattttcctttctcataatactgcttatctgctattccggaattcttattcgtaacctggaataattcgtctgcgacaatatactgaatcagcttggattcataatcaaaggttaccgattgattaaacaatctggaatatatgaagtggaccttattaaatattcgcttttcttcatttgtcgtatgctgtgtcattctggtttttacatgattggattcacctatataggctttctttccattttccagaatatataacattggccagttatccaaatattcttcgttactgtatttattatttttgaaatctccttcaattattttgaacatggtatttctccggtgtatttatatttgtatggtttcgaatttcctaatattaattatacttcgctgactattaacacacaagaagaagtcatatttctacgacttcttccatatctattacagcataatccaggccgtttcctcctgttcacttttcagactctttttacagatcttgcagattgttcctgccggtgtaaccaataccaccttcgcatatgccgtgtcaccaatcttgtcatacaggcggcctgcactcatagattcaccgatgactgtatacgaactatttgccacataaccgatcttcccaagtccttcatacgttactttgattgcttccttgtcatattcattatccggttctttttctaatctgatcttcatacctttttccagaaaatcatttccgaagtagtgttttgttcctgtcagggtgataaatatttttgccattgtgtgtgctcctttcgctttgaaaacgtgttcatctgaatttaatttgttgtcttataattacttttatctcccggaattctgttttattccctttgatgtgtatagtataattcagatggtggggtataatattctcacctctttttattttcatacatcaaaaaaggaaatcaaccgcagtcaattccctcttctcatcatcaatcatacacccttttcaacacttccagatcaacctcaagctccctgtcaccatctcttaccctggcaatcaccggtacccccgttaatctctcgatcattttctcattatcttcctgcatcgccccacccgagtaatgattcagaatgattccttttacatccattccgtgattccggatgtattctaccgtcaggacaaccgcattgatcgtgccaagtccggcatctgcgatcaccagagtattcagatgcagcattttcacaatatcttccagcaggatctcatgttcttcatcccagcggatcggacatacaataccgccgcttccttctaccgtgacataatcgaacgctttctttaccctgtcaaaatctgcttttaccgtttccggatcaaccggattcccttctattctggcagccagatgcggagacaccgcattttgatacagatatgacagtaagctgctgtcttcctgtgtgataccggcaatcttctttacatagcctgcgtcactttcttctatggactctgcacctgataatgcagccttataatagcctgcatggattcctgcatccgccagctttttcacgattaatgctgtgacatacgtctttcctacatctgtgcctgtgcccgtcacaaatattccttttgccataatctcatgccccttttttattaactcagataaaatccgcttttccgcattctaagtcccacaccggctgccagcagacataatacaaaatctccaggcatatctaatgggaagcaggacaaaaagatcacgcccaacgttgccggtgtatgtgcataaaagtttaagattataaatttatacacgattccgattgcatatgtcacaacaaatccggccagacaggcaagcagatagttcttgtaacttgctttcagcttttcgcatacttttccggttacatatgcgcttacaatgaatccgaccagataaccaaagcttggccggaatatgtatccgattcctccgcctgctgcaaagattggtactccgacaagtcccagtaatacataacatcctacagatattgctcccttatcagcccccagaatcaatcctgcaagcagtacgaaaaagaactgaagtgtgaaataatccatatatggaaccgggatctggataaatgctcctatggcaaccagcgctgcgaacattccgcataataccatacttacggtggataatttttttgtttttgtgttcattaaattgttaaccttcctttccgtttatggttaacaatttatcgtatttcgctttgattgtcaacttatttttcttgcaagtttacaatcgtgttcttgttttgctattttagaatccatttcctactccccatactgctccataagcctccgggcctctccccgcatctgctccacaacctcatccggtccaatgatcttaactgcttcccccagcgagaatacccatcccaggaactgtttgctcacatgcacgtccacattcacccggaaataatcctcatcttccggaatcatcatcacatctttcccgaaccggtcaatgatcacgcccgcaaggctgttatttaccagcatctttacagacgtttcctttcccctgaacattccgaaactcttcttggcataatccgccatatccagcttcttgaagtgttctcttccctcgcgggattcatccgacatccggatatgcagcatcttatccacccggtaatgcttgatcagctgcgcctctgtatcatatccgatcatataataattctcatcatcccaggacaatccccacgggctgatatgataccatgctcctccgtgacgcagttccatctctttcttcacattccactggaaatactggaacttgatcttcttatttttagaaatcgcattgtggattgcatcgacagtataatagatgctttcattcatcgtcttaattcttccggatacatacacctgtcgctgcagcctctgtgcatcgtatttgctgaccagcttttccagcttttttatcagtgtgttggtcttcttctctgtaatgaatttggaagactggatggaatctaccagaagctttaattccggcagttcgaatgggcggttgactacgcggtaatgatagcggttgccgatgggttcgccctctacctcgatcccgagtacagacagatcacgcagatctgcatagattgttttgcgatctgcggtcacttcgtattttcccagttcttccatgatttccggcatggtaatatagtgttcatcatctgtattttccagcatgatctgtgcgagacggtataattttagcttttgatttgttccttttggcataatcacatctcctccaccaacatctcctgatacacggcagtcccatactcttcgatcctatccaccaccggtttcaatctcccatccgtaatccgctccagtatcttcatgcgcttcggcgatatcacttcctctgacctgcacttctcataatccgccgtttccatatgccagtaatgaaattctcccttataatactgtgataatttctgtgcgatcagtattccttccgggtcaaggtcacccgcataatatacccggattcccgactttgcaaatagatccatctgtatcatctgatacaggaaatttcctgctgcagttccattgtcaaatgcatgcgaatttcctgtcagcatggtgagatcctactggcactgttccggtctgtaatccgcaaaaagcgggtcctgtatcatttcttcatagacctcttcctgatacagccaatattttaatttctcataatgctcgaaaaagatacgcatgatacagcggtatctgcttacgttgtcggcatttaaatattttgcttctgtcaatggcttgattaatttatctgatacctgcatagaacttctccttctggttaattaagttcagtatagcacatgcgttggaaatagattccatagttctttgtttttctgaaaattctgccttgatttctaatcatttacataatcataataatccgcctcgctggcaaataagatatattcgccatctaccattcccatgtaaccgtcacctgtgttaaaacctttcattgccagttcctccatttctttgaaaaataatgattttgatttgttttcccttttatgtctatagtttataacatcagatggggtataaaattaccatcagtaacaaaaaatacccgaaaagatttctcttctcaggtatctttatctatccctattctattttcgctgattatgggcatcggtttctctccaccatctacccattcaaccttttcagctgcttaaacttctgccttcttaataattccgacaccaagcggatacggtcctgtatgcacaccaatcgttgctccaatctggtagattccgatctcatcgattccaagccgttcttttatcagatcctttatcatctcacggaatctgactgcctcgtcatagtcataaccatatccgatgcaaaaattatattcaccaggttttgcatcgatctcgtccagataatttttcgtcatatctacaacctttttcatagacttgatacggtttcttgccagtccggaactgaagatttccccttcttttaatgtaatcatcggttttatccccagtgctccggcagctatcccggccagtttaccgattcgtccaccatgtctcagataatcaatacttccgattgtaaagaagatccgtcccgtctcgcgtatcggaagaattttctccacaatttcttcatatcccaatcccatatcacgcagtctgcatgcttctaacacgaaaagcccctgaagtactgtattcaccgttgagtcgatcagcgtaatctttgcatccgggtactcttcttcgatcatttcctttgcgacagttgccgactgcagtgaaccgctgaatttgcgggtaatacagatgcagataaccggtatctgctctttcacacttttttcgaacacctgatagaagtcatccaccgatggcatggaagacttcggaaatacatccgggtattccaccatttcgttataaaaatctctgactcctaattccaccatttccttctgatatgtctcactgtcaaaagacacatagaatggtacaacctctatatcatgctcttttgtaatctcctgcgaaagatccaacgatccgtcactgacaatctgtactttcttctgcatatccattacctctctacttatatattctgtaaaaataaatttctcatacattttacatgtagttttcaatactacattcttgaaaacgtagaacagtataacacagggtatctcaagtgtatataaccatgcttcatactttcttaaaattttatactttttaaggaaaaggcatagccacagcttcctgtaaatttaccgggattttttcgtagcatttttcaaaaaattttttacaagctttttttgaaagctttttctgaaaatctattgacttggagtccgcttcaagtgctagtatgaactcagaaactgaaaggaaatcttagaaatgtacaataaaaaattaacattaagtaacggtgtggaaattcctcaattaggacttggaacatagttcatcgatgataataaagtcgctgatgcagtcaaagctgctgccaatctcggctacagacattttgacactgcacaggcttacggaaatgagcgtggtgtcggcgaaggaatccatacatgtggtattccgagagaagaattattcgttgtatccaaagttgctgcagagcataaaacttatgaagatgccaaagcaaacctatggtaaatcagattcttcttcacatcagcaacactcctctggaacttgttgagtactgccagaagaagggtatcgctgtagaagcttactccccaatcgctcatggcgagattttacaccagccggagattgcctctatggctgaaaaatacggagtatctgttccacagctttgcatccgttatacactgcagctcggtgcgatttcacttcctaaaaccggtaatccggaacatatgaagacaaatgccgatgtagactttgagattagtgccgaagatatggaagttctgaagaatttcaaacatatcgaaagctatggagaaagcagcggattcccggtatacggcggaaaactgtaaattattcaaaaaagagataaacatattataaatcaaatatttaatcaaaatattttctgatcatagagaggttactaagatgaacaaaccatatattatctgccacatgatgacttctgttgatggcagaatcgactgtgccatgacatcccagcttccgggtgtcgaggactattataagacactggacggactgaatgttccgactaccgtgagcggccgtgtcactgcggaacttgagatggctgaacctggattcttcgaagcaaaaaattctgaaacatatacccaggaaggattttctaaaaaagctgatgccaaaggctatgaaattatcgttgataccaagggaaagcttctctggccggatgcctctgatatggacaagccttacctgatcatcacaagtgaacaggtaacgaaagaatatctggcatatctggacggacagcatatctcatggattgcctgcggaaaagaacggatcgatctcgtacgtgcctgcgagatcctcgcttctgaattcggcgtagaacgcatgggtatcgtcggcggtcctgcaatcaataccggtttcctggatgccggacttctggacgagatcagcatcctgatgggtgctggaatcgatgccagacgggaaatgccttctgtcttcgacggcttcgccatggatcatccgctggtacatctgaagcttacaaatgtgcagagatttgacagtgatgcgatctggattcggtataatgtataattattgtatagttattgcatatctatcgtatggaaatttaagtgaactgatactaccaagggcagtgctgattatcattgtaatcaacactgcccttattttcatcgtcatgttttcgggagaagctgccagtggcaggctctctgtatttctctctattcttttattccgcattctctgtatccagagatttttcaatctcctctataatctgcactgctttttctgcttcatccgcctctgcccagatatcaacgccgtatactccgaatccggcaactccatatgctgctacacttgagcttggttcctgtgtgaatgcagcaattccattttcttttagcatttctaccagcatctctgcctcaatgatattttctgcattgtagatttttttgcatcctgttgctttcatgagaatccctccttatcgttttaatcattttccgaatataagcatcgtccgataatcttcacagactttctcctgtgtaaagattccttttttcgaatgccagagaaaatatctgtcattatacgccttctttgtggccaaatcaataatctgaattcctttattttccggatgttccttatccgccgtgacaacctccatataaatataataagtctgatttccttttgttatttttgcacctgaatccattatacgataaaaatttctgtcctgacttcctgttactctcattaaaatactatccttatcaagagttccgtcttttattgtctcgctgtaaaattcaagaaatttgtccggttgcttttcaaatttttctcctgatacattttttgcaaataatttttctattttcttcttatcattctgattgccgcatccagaaaatctgtaaggatttctgtaaactctccgtgatctgatctgaataatctactcagaaatgttttcccgcatccagatatcaatgttacaaccagcataaatgttattctttttttcaccatccgtccccactgctctcaggattttacatcttttcataataccccaaagctctttcatatagttctctacattgccgttcatctccatatgccagacaatcacattgattttattcccagtcaaattcatcaatagcatctttgatttctacagaaatcgattcctcattttttaattctctaataacttctgcaaacttatcacgctgtggattattaatatcattgtaacaccgatgaagcatccagatattgtgcggggttggtttttcacttactgaagcaattaacagttcttcatacccatttttatagaactgctcaacaaaatgtaccagttctcccggcattccaaaatctaccgagggattgtccgcaataatttctaaaatcggtgccaccaattcgtaaggattagaatatgtatttatagcatccactacttcgtcatcaatataatactcttcatatggttttgccgccgctttcagtgcaccaataatttgttccttagtcatatatttctcctctttcagaattctaatctgtctttacttcatcctatcataatttatcggataattctattcttgaccttatagagaacagccaaaaatcatgactttatgattcctgtcattcactcattttacgctttaataattgatatattttcctgccatcttttctgccaaattgatgaagtgctcccatatacaagtctttcttcccctgatgtctctttgcactcacaaaatcaataatttccgctgatttgcattcatattctgttccagtcagaatatttttcaattctttttttattctgttaccttcttcaatccgggcactctctgcagacaaatctaataataattttcgattctgtattttctttcttctctctgcatcctccggtgcatgaaataatgtaagtgcattttctatatttcctgctttgacaatttgaatccgattcgcattctgatccgctccaaagaaatcaataacggcctgaaatcctttatcattgcttatgattgcaatctcattttctcctctttcactaatgattccacattctgccgcaatataaaaatcaagtgcattctttcctgtaccttttaattttataacccggaattcacagccactctctttaatctcctgtataatcatatcgtatttttccgcagtttttgctatagaagattattaaagtgtcatctctacataacacatccgttccctttaatccattagaaccttttacattctcataatcaactaatattgttggcatgattatcaccccttgccaatcagttacgtatataccttccagactatcttgctcatgaatccgcatatataccattggtatattatttttttcatataccaatggtattgtcaagctgattatgctaaaatataaatatcaaaatttcaatcatagtaggagtatcagtaaaagcaatggatattttagataaagaacgattaaaagaatgtcgactgaaactagggataaccaaacaagaggctgccaaaagaattcagatttctcaacctgcgtatctgcgatacgaggccggttcacgtaacccttctatacagattatttctaaaatggctgaagttttttcaacatctacagattatcttattggaaaatctgcagattcaagtccgaatagactagtcgttgaacaaagtgacactccagcgctattttctctcgttgaaacatgcaaaactctaaacgcggctcaactaatgcggctcacggcttatgcaaaggcattatcaaatgttacttctgatagtgaaaaataatttccagagatactattggaaatccttctacaatatataacagtcgaaacttttgccatggcaacgaaaggccttgatctacaagttgttttgctcatatttcaaggtctgattttcccatgaaaaattatatttttatttttaatacagatctcctacatacccttccgattccaaatgcatataacactcattcacctgatccgctcctaaaatctgtaacacatatttcatccctgtagccagttctctggttttcagttcttctaacgggatccaatatacttgtccttcctcagaacttttcagttctccgatgaatttttctgctttatataacataatcacgctatgtacaccgtcctcatgccagtgatacaaaccacaaagcttcggcgactcaatcgtaagtcccgtctcttcccacacttcccggattatggatttctgaaatatttcattctgttctacatgtccgcccggaaaagttgtaccggtataactgtcattcaccttatccaacgccaatacatttcctttatcatcctgtaccatacacatattcataaaacagactttctcgtttctgttctcttccttttcattcagttcttttcttacacgcctgttaatagctgaccttttagatttataatgcctgagcacttctccataaggaacccagatctctgcttcttcgattttttcataaactatattcaccactttttctatctgtctgtcatttggaaatgtgtaattttttgtataatagtctctggttacctgaaacatccattctgcaatcttttctttttgttttaattttaactgagcgtatttcttatccgtctgcagtaatttaccatctgtcatcttatggtttttctgtgacatcggtatgacctcttttcttttttctcatttcttttttgaagcttattttatccgctcgaaacaccttatctatgccagattactttacttacatttcagtaactcatccgtctctgatttctgctccattgtctccattcaaccatctgcccatgtacagtactaatatgtgatactatagttcaactttgtctgcaggtttccttcctgataaacttccatatacacttcatgactgcccaattcaacaaacagtccaaaattatatttaaaatcttccttttgatcagttaaatacatcaatttatttctgtcattctctttatcataagtttcagcatttttctttttaaattcaatcacaaggagattatttctattgcttcgtcttctgtgaattaccagatcaggaataatctttctgtcactacgcatcattttaggatcattcatattccgattgtattcacaatctaaatcagcccattgaaacttagtaagtgtattcattttatttttcatgtaacttcctatatgaaaaaccatacattgttcagaaatcatgtcctcttcattggacatttcaattaaatccctgtcatttttgtagaatttttccaatgacgcatttactaacttttttatatcttcaaattttacttcatcttttggattcattgatcattcctcctgaaaatttcttcttccaccttcaacagtggcaattccatcatcgaaatgccctttaaatttacaaagttttctgtttcgtcgtgcgcatcaatataaaacataaaattttgttctatatcagtaaaatcatatccataaaccatctctatcgtttcgataatatcatctgagtcttgataaaaatcaataattgtacttttctttcttccatcaaggtaataaaatacagacgtatttaacaactgaaaaatatcttcttctgtccatccatttttccgaacatattccataagatatttatacagttcggtggaattttcagtatcattatataaagtcacctgactattttcttcataatcttcaagtgcctcatatactaccaatggaatttctccgcaacttacatgctcatcccaatttttcccactaggtgtatccgcgtcaaagtcacttaaggtgatatcttctatatttgacatgttcaaaaataataccttattattcatacatggaatcaccattaactcttcatcaatgcccttatatatcatctttcgtgtattactgttaattggataccacatatatttgtcaattccacataacttgattcctacatgtccccaaaatccactaatttcatcaagtgcatccttcatatccatataatattccatttcactaaattgtggttcaaaaaagtattgatttgttataacatgagtgctcgtacgaagctgcatcgcaatctccctaagttctgtgattgttgccttctccccggcctctatctgttgtaatctttcctgagaaattcccgtcgcactcgccattttttctgtagatattcttattatacttcgaatttcacgcactctatttgaactgcatgcattatttcccaataaaatatctggtgttatttggagataattcattatttttgacatatgtgtttcataattttttttgctggtaatagttccacttaaaaccttatctattgtcggtctggaaacccctgtcttctttgacaactctgctttagtacatttcttttccattaaaatctgttccagacgtgttcctaccggacttcgtctatcaaacaaatcctccaatgtatacatacagctttccctcccttatatgtctatatgatatcactgctttgtttgtgtgtaaatattttttttaatgttttacttttatttttttacaatcaatattattacatatacaaaaaacagcaggtaatctcatagactacctgctatatgttttttgatattctaatattagttatattatatcttttacatgttacccgtaattctccaaaatataattataaggctcagaacctactattatgtagattctgaaccttagtcatattctggctattcatttttacaaaaactgaataataaggtttgtggacaaacatttacattattcaaactcaatcgttccaggcggtttactagtcagatcatagaatactctgttaactcccttaacctcattaataatcctgctcatcaccttattcagtacatcataaggaatttcagcagcctcagctgtcatgaaatctacagttgttactgctcttaaagcaacagcataatcgtatgttctctcatcacccataacgccgacacttctcatatttgtcagtgctgcgaagtactggttgatgttcttatcaagacccgcgttagcaatctcttctctatagatagcatctgcatcctgaacgatcttaactttttcttctgtgacttcaccgatgatacggattccaagtccaggtccagggaatggctgacggaataccagtctctccggaattccaagctccaatcctgccttacgtacttcgtctttgaacagatcacgaagaggctcaatgatatctttaaaatctacatgctccggaagtccacctacattgtggtgagatttaatcactccggattctccaccgagtccgctttctacaacgtccggataaatggttccctgtgcgaggaagtctacagcaccgatcttcttggcttcttcttcgaagatacggatgaattcttcaccgatgatcttacgttttgcttctggttctgttactccggctaatttatcgtaatatctctgctgcgcatttacacggataaagttcaggtcgaactgtccatttggtccgaatacaccttctacttcatcaccttcgtctttacggagaagaccatgatcgacaaatacacatgtcaactgctttccgatagctctggataacaatcctgctgccactgaagaatctactccgcctgacagtgcaagaagtactcttccgtcgccgactttttcgcggatctcccggattgtattctctacgaatgcatccatcttccagtcgcctgcacatccgcagacacctaatacgaagttcgataacatcttagttccttctgctgtgtgaagtacttccggatgatactggatcgcatataatccagcttctgtattctcagctgctgcgaccgggcagtctgctgtgtgtgctgtgatctcgaatccaggtgcaacctgtgagatatagtcaaaatggctcatccagcagatggtcttctcagatacaccttcgaaaatcttggaatctttcttatctaccagcacttctgtcttaccatactcacgtaccggagcggattctacctttcctccaagtacatgcatcataagctgtgcaccgtaacataatccaagaaccgggataccaagttcgaacaattcttttttatatgtcggggaatctgcttcataacagctgtttggtccgcctgtcaggatgattcccttaggattcatagctttgatcttctcaatatctgtcttatatgagtagatctcgcaatatacattgcattctctgacacgtcttgctaccagctgattgtactgtccaccaaagtcaatgacaattactaattcttttttcacaagaacttcctcctatttgttttctatatggctaacctttattataaaatagaagtcccgtttttacaagggacttctatcttttctccgataaaccagactttttctatcgtaactagcaactatctgctgacaaacgttttctatcctatacaatcgcatttttcttccaacttcctttgaaataccggatcacgaaacacattgcccggaatacccagtcgatcaccatcgcaacccagataccgaatacacccattcccatatattttccaagcacataactgaatccgattcggaagatccacatggatatgctcgaaatgtacatacatgccttcgcatcacccgctgcacggaacgtcgcaggcaggctaaacgcaaccggccagataaatatcgcaccgattccgtggaaatgtatgatgtccgccgtcgtctttgctgtaagatcggacaggttatatgcatttaatataaatggcagtaaggagaatataaataataccatcgcagtcatactgacataagtaatgagcattaatttcttattataatacttcgcctgttcataatcgcccgcacccacacatctggaaataaccggtgtgattgccagcgtaattgccattcccggaaggatctggaacaatgcgattgcatttgacaccgcatttgccgcaatcgcataggttccgaatgtcgataccaagctgagcacgataatctttccaagttggaacatgctgttctccaggccattcggcacaccgatacttagaatcttcttaaccatttcccagttaattcggtaacgccaggtccgttctatgtgaagcgtccgtttctcatcacacaatagcacaattataataatcgccgccgtcatccttgacaccagtgtcggaatcgcaaccccttccgttccacggtgaaaaccatagatcaagatcgcatttcctcctatattaataacgttcatgatgatcgatatttgcattgttaccttcgaattgcccattgtacggaagatcgccgctcctccgttatacagtgccatgaatggaatcgatgccgccacgatcagcaggtaaatgtctgcatgatgcatcacatcctggtcgatttttccaaatactgtatgtaaaataaaggattttcccagatatacaagcactgtaatgccgattgcacagatcgtgataaaccataccatctgcgttgccgacttacaggcttcttcccgtctgtcctgtcccaggaactgccccgcaacgactgctcctcccgtagccagtgctgaaaatgcattgatcaacagcaccataatctgatctaccaacgatactcccgacaccgccgcctcgccgacgcttgcgatcatgatggaatccgccattccaaccagtaccgccagaagctgctcgaccactaacggcaggatcaatgccaacagtgctttattatcaaagaaatatgcctgtcgtttttcttttttgctttttcccatttcccattttcctctcccgtaatatttatatatctacagtacctgccaccgacagcttcttccgaatgcataacaatacagaaatcctgccactggcggcttttcttgcatactttggtatacaaaaaagttccccaacgtatactcttattatacgctgaggattcttctcacacaatatcccatccccgcagaaatttttactaaaattttcactaaaaattcccacggtatcttttttgtcagactgcagacgctttattgtccgtccttttcaacataactgcaaccctacgcagctacgaatttatccagctctttccagagatcatcgcattcttcatcatatactttcagctcgatcttctggtcaaatccaagattcataagacctaacagggactttgcatctacaatatatctaccccgtttcatatccatatcaaaaggatatttttctacgatctttacaaaatctatcacatcacccggattcgaaaaaataacatttttcgtactcattattggtccctcctttttcttatcggaaccatattaacactctcatgcatttccacaagggggaaatatttaaaaaaggatgactttttttgactgaaaatgcatttttttaatgtttttcactatctaaccgttctttttccggtattcaagtggcaacattccagtctcttccttgaacacgcggctcatgtatttcggatcggtataacctgccagttccgcaattttagtcagcttccagttcgttgccgtcagaagttcttttatacgttcaatccggtacccacggatcgtctctgtaaatgtccgtcccgtctcttttcgaaactgagtgctcagatattcttccgtcacatgtagcttttctgcaatctcttccaatgtaataccctgatcataatattctcggatattctccagtgccttttgaatcagaagactcatatcgttttccgcttcgtctttgctcgtcagatattcaaaaaaagtatccactttttcttccacatctgtccatccatttgccctggaaatccgctgaagaaatgtctgtccttttctctgtgcctgtaccgccccggtttccgctgccatctggatcagaaccagtgcaatacggatacagccctccttggcctcctgcggggtacatggaagttccctgcaataatcccagtatctggaaaatatttttttcaatcgtttcgcatctttattcagtaatgcttccttggcttctttttcaaggttcaccggatatttatatggatataatgcaattttctgtattttttctttacagatcaatgttccctttttcaatatcagattccattctgccgcatgatctagttctctgaccgcttcgtacatattgccgaatccgttgctgaccgcccatgtacagatcacccttccgcgcaccgtattgcagatcatcggaacaatcgtctgttccagatactgataggtctcatgttcatttcccatatgataaaaaaggaccacaaaactctgacgtccgtacatctcgatggtataggcacagaaatcctgttgctgattgaagatttccaattctttcagcatctgcagcacttgttctttatatttctcataattagaactcatgccgataccaagaacaccaatccgttcctccggtgcaattccgtatccttcctttataaggtctcctatctgctgatcatctttgatcttcccagccatcgcattcaggaaaatgtattccagattcagaatgtgtttccactttttctcgctttccagctctcttctcagccttcccagtacattacgcacctcgtagactttcaacggtttgaccagaaaatctacagcaccaagttccatcgcgcgtttcgcataaaggaattccgggcaggaacttgtaaccacaattttgcaggatatccctcttctctgcaatgcctcgatcatctcgaatccatccacctccggcatccggacatccgtaaatatcacatccggtgtgagattatcccgtatcagtttttcggtcagcgcaagaccttctgccccgttggacgcactccccacgatctctatatccgactcttcctgttccagacattgtaacagttcgttcttatataattcattatcttctatgacaattattctcacgtggaatacctccttccagattatatcttactctatcccagatgatacgcatccagtgtcttcgccagatatctgactgtcttatccaccgcctcgtctaccgtcggcttgtccctgtcacttcgcatgattgcaagcattccccgatagatcagcacactcatttcattcagttctttgatctcctgctcagatatcacataatttctttctctgatcacatctcttagcagatcttcgttgcgtttgaagaaatctccttctttcaaaaacccttcgtaatcttctgtcttttcttccttttcatttggataaatctcataatatctccggaaaacctcattcaggttctgtgtcccttccggactgaagaataagaagttatagattctcggtctctggaacgaatgtctgcaaaagcagcgccactgtcccagataccactcctgaaaatcctttccctcggccttgtgtatcaacgtttcctgcatatattcatccagacattttacacttgcaaataattccagttcatccagattagagaaataatgatacagcgttgcactgttgtattttgcctgttctgcaaccttcctgatcgtcagattctcaattccttctttttccattaattcaattgtcgcattgatgaaatacgacataatcctttttctcttttcctgtctgtttcctccaactgttgccacagtctgctgtcctccttcattctcttccttaattttaactttttgcaatttttaacaacatttcatatatccgatttatttatctcttttattaatatatccatttttatattagcatttcaataaaattttttcaattcataataattatgcataatttatttttattatgcactatcattttatcttatatgcacaatttgtaaacaatgattgacttccatttaattatatagtatcttattactatgcgttttatataagctgggaaacttggataaaatacgtgtataaaatattggaggttttttatgggaaacaaaagaacaaaaaaatccatcagtcttgaaggattcgtctttctggcaatctttttaggaattttcggtggtatgggtatgaaaatgggcggtgtcaatatgctgaacacattgatgaacaccggctaccagctgcttcttgagacagtcttctatattatggcaatcgcggttcttgccggagccatttcaggactgttctcagaattcggtgtcatttcgatggtgaataaattactgtcaccgctgatgaagccactttataatctgccgggtgccgcagcactcggtgtaatcactacttatctgtccgacaatccggcaatcctgggacttgctgaagataagaatttccgtaaatatttcaagaaattccagcttccggctttaacgaaccttggaacatctttcggaatgggactgattgtaagtacattcatgatcggtctgaagttaaaaggtggacacgccggaactgctgtactggtcggtaacttttccgccataatcggcagtatcatcagtgtccgcatcatgcttcatttcaccaagaaagaatatggaaccgaagaatactgcgtacagttcgaagaacatgaagacatggatgccatcatgaatacccgcgagatccgtgacggaggcatcggcggacgtgccatcgaggcacttcttgagggtggtaaaaacggtgtggatgtcggccttgccatcatcccgggcgttatcaccatctgtacactggtcatgatgctgaccaacggcgcatctgcagacggaacttacaccggtgccgcttatgaaggaatcgctttccttccatggcttggaaagaagcttgaattcatcttatcaccgctttttggattcacagatgcatccggaatctccgttccgatcacggcactcggtgctgccggtgccgcaatcggactggtaccgcacatggcagaagccggaaccgtcctcgccaatgacatagccgtattcactgcaatgtgcatgtgctggagcggatacctcagcacacatgtggctatgatgtcttcacttaaagtgaacaagctaaccggaaaggcaattttaagccacacgattggtggactctgcgccggggtcgccgccaactggatctttaaactggtgatgttgttcttatgattatgaaggctgtgtttttacaattcgaaacatcataattcttggaaataattagttgtataaaaactccgcaaggatattcgaatgaatcgtctatatatgatgcttctccagaatatctgtgcggagttttttgttctgttgttatcttttatcccatgaaatcgactcgttgatgcccgaaattataagagctttttgttctattactctctttatcctgcgtgccgatgctggtgaagatatttctcccgggtggcaagtccgccacgaatgtggcgttcctgcttgttcacatcaagaactttgcggacgctctgcgccagggtcgggttgatctgctccaagcggtcggtgcagtctttatgtatcgtactcttactaaccccaaactccttcgcggtctgacgcacagtggctttatgttcgatgatataatatgcgatttctactgccctctcctcaatataatctttcataaaaataacccctgcataaattgttttttacaatctatgcaagggcattttgatgtatgtctgcattttccttttgaacgtaggggctcacctgcaaaaaagtcacattccccgtccccatgacacaattccgattcctatcaagattacacctcccagaacatctgcctttcctgacagctttgttcccagagtcttaccgaggcacaaccctgtctcacatatcacaaacgttaccactgccacgatcagtgaacagactacagccataaccaaaccatacccggcagtggtaaatcctaccgacaacgcatcaatcgatgttgcaatcccctgcatcataagcacggcaaaacttaatcttttcacttctttcttttcctcttcactctgcacagattctttgatcatgcttcctccgatatacaaaagcaaaatcaatgcgatccacggaatgaacttctgaaactgtccaaagacctgtacgatcgtatgcacacatatccatcctatcataggcatcaggaactgaaagaatgcatatactcccgcaatataagccattcttgatttcttcatatttttttcattcattccatttgccagcgagaccgaaaatgcatccattgccagtcccactccaagtaagacactgttcataaagaataaaaaattccactccattatcatttcctccaaaattaagttcaaacgcatgacaacaaaaaaaccagatacagcagctgcctgccatacctggtctatactttctttataggatagagagagtccacgcatagatattacagctacacatgagtctcacaaattaaaacaagccagatccatcgatcagtatgttgacttgttgcgttatacgcctgttactcccccatcggtcatttatcatctaaaagaaaatatcataattaataaattttgtcaataagcaatcatttattcctttttctgtggtatgctttacacagagattttccccggaacaactctgaaaagaaccaataaaggagtcacaacaatgtctcactactacatgttccacaaacctttcggctgtgtcactgccagacgcgacgaccgctatccgacggttatggactattttaaggaattacataatgacaggctttctccggtcggacgccttgaccgtgagacgaccggacttcttctgatcacagatgacggtatcttcaaccagaagctcactcatccttcctatcacaaagagaaaacttatgaattcacccttcttggtgatctgacaccggaactggtacataagctggaaacaggtgtcattctgaagggcgccgataccctgactgccccggcaaaaattaccgtaaccggacatgcagtaatgtccgatattctttccacactgccggaagaaatccagaaagatatccacaaaaaccgtccggatcaccccatcacctatgggataattaccatttccgaagggaagaaacgccagattcggcgcatgatgaagtctgttcactgctgtgtgatcgaattaaaacgtatttccatcggagacattgtacttgataaagcgctttgtcccggagagtggaaagaaatatttcctcacacctaacaatacagagaacctgccacttgccaaaccatccgtaaggaactgccagtggcagttcctgtaggtggcagcttttcttgcatactttggtatacaaaaatgctccgggaatctgtcacctgacaaaattcccggagcatttttattcttattctattctgtttctatccaccttagttacctgagcttgatgaactgcttgaacttgacgaactgcttgagcttgatgagctgcttgagcttgatgagctgcttgagcttgactcaacctgaatgcactgattagccagccattcttttacaagatcattcagcgcaatctctttcagatctgactttgatgcagctttctttaaagcttttacactgtcgtatccatactcttttgcaatcttcttaagctctgtcttataagttgcatcatctaacttaatgttctctttatctgcaattgcctttgttaccaatgtctgctttacactggattttgcagcttttgttacctgtttttcgaacttttcaacagttgttcccatctgctgcttgatcagatcatcatatgacatgttataagcttttgcaacagacttgtactgagagatcagagaatcctcaatcttctttacatctttctccggatatttcttaacttttgtattatcaagaaccttctgccatgctgcctgctgcaaagtatcattgtatgtcttttcgttatcttcctcgagagacttcttcacttcttctttgtactcttttactgtctttgatttcttagatactttctttaccagtttgtctgtaagctttggtgtattctttttggaaatggattttacagtaattgtaaatgttacatctttgcctgcaagatcagaacttccataattctccgggaactttccgttccagtcaaatgtatcaccgatcttgtgtccgataatactgtcttcaaatccttcgatgaaagaattagaaccgatctccagtggataatctgtagaagatccaccgtcaaatgctttgccattcatctttccaacgaaatcaatcgttgctgtatcgcctttttttactgcacggtctgttacttcttttgttgttgcattttcatccagtactgactgaatctgtgtattcacatcatcatccgttacttcgcttggtttgtcaactttatctacttcaacacctttgtagactgaaatcttaatgttgtcattttcaagacctttcgtcgactgacaaccagtcatcaaaagagagactgccataacacctgttaataacattgccactttctttttcatatcgcacctcattttatcattcattctaaggtgggaactttatcccatctgctttccgaagtatacgctaacgcataccactctgttatatcacattttgaaaaactttcatagcattttcacatatatttcactcttttatcaaaatttttgttttgaaatcacctacttttcctgtatacttcttgcactcctaccgaaacaatgttagaatacttgttatggaatatagaatataggaggttcattgtgaagacatttacaattgtattattggtaatccttgtgattttgatcgttgcatgtgttgcattatattttgttggtaaaaaagcagaaaagaaacaggcagatcagcaggcacagcttgatgcagttgcacagactgtttccatcctggttatcgataaaggtcgtatgaaattaaaagatgccggcttgccggatatcgtactcgagaatacaccaaagtatcttcgccgttcaaaagtaccggttgtaaaagccaaagtcggaccgaagatcatgacacttatgtgtgatgcgcaggtttatcctttgattcctgttaagaaggaagtcaaagctacgatcagtggtatttacatcacagctgttaaaggtgtaagaggccctctggatgtaccggagaagaaaaagggatttttcgcaagattaagaaacaaataagagtaaagagtacttaaaaacagcattggaacttatcgttccagtgctgttatttttatgtctatattgcaatcggcaacaggatctccgttgatgtccagtgcataattcacatgcaccgtgatcttttcatcctgttcttcgaactggatatccttggtaaagactccaatcatcatctcaccgtatggtgtctcatactgtgtcatattgatcttatctttctcgaataccatgtgggtattcgtaattccgctcttgatgatctcgaccttctggtcatccaggatccttactttattcttgatggttcccgggattccttccaccagttcatcatagatcacataacgctttccatttttctcataatagctcgcaggtgcgattacctcgattggttcacttcccggctcatcgccctgtgcttcaatcccggtcacatcctgatgcagaccggatatacttaataatacgtcttttgtcatatattctcctaataatcttcaatatcaattgcctgtgtcttatctacatcgtacggcaggattgaattggcgaattttttaaacttctctgccgcatcactgacataaaaatcatatgctgccggttttcccgatgtattagcaattttctgcttttccagtatctgcttcaaatccatcgctgtctcgtacgccggatttacaatatgtacagactctccaaaatatgccataatcctggatctgagaagcggatagtgggtacatcccagaatcagtgtatcaatctccgactttctcatatcggacagatagatatcgatcacttcttctgtgatcttatgctttgcaaatccttcttctaccaacggtacgaataacggacatggctttccgatgacttctgcctccggcataagtttccggatttctttggtataggtctcgctcttgatcgttgcttctgtaccaagtacaccaatctgaccattcctggtctcccttacggcagctcttgctcccggtacgatcactccgatgatcggaatgtcgaactcttgctgcactgtctcaagcgccagcgcactggccgtattacatgcgatcacgattgcctttacattctttgtctttaaaaaacggatgatctgtctggaaaaacggataatgttattctttgacttacttccgtatggaactcttgctgtatccccaaaatatactacattttcattcggcagctgacgcatgatctctcttgtgacggtcaaaccgccgactcccgaatcaaacacaccgattgctgcagtgttcctgtttttattttccacgatattaaatctccttttatgaatactccaccatattttactattgtaccgtcttggacgtgcattttcaagagattttatgtcgaaacctcccttgtatactttgctataaaaaaagttacctgccataaaacagataactttttattctttattccggttttaattacagagccagctcttttgcaatctcatactggtaagcaggaattccttttgtcattccaagtgcttcatcaatatcgaagtctacatactcaccatgtttgtaacctacaacacggtttgtctttccttcaagcagaagatctacggcttttgctcccatgatagaagcatatactctgtctttacatgtcgggcttccaccacgctgcatgtgtccgagaatcgttgctcttgtctccataccggttgcttcttcaattctcttagccatgttcatagaatctccaacaccctctgcattgatgatgatgtagttcttctttccacgttttcttgattcctgaatatcagcaatgatcttatcttcgtcataatcatgctcttcaggcatcaggatcttctcagctccgttagcaataccgcaccacagtgcaaggtatcctgcatctctacccataacctcgatgatagagcatctctcatgagaagttgatgtatcacgtactttgtcaatagcctgcatagctgtattaacggctgtatcgaatccgattgtatattccgtacaggcaatatccagatcgatcgttcccggaagtccgattgtgttgattccgaagttagcaagtttctgagctccggcaaatgatccgtcaccaccgatgactaccagaccatcaataccatattttttgcagatagctgctgctttctgctgaccttcctctgtacgcatctctgcacaacgggctgtctgaagaattgtacctccgcgctcaattgtatcggatacgtctctggctgacagatcgataatttcctcgtttaaaagtccctgatatcctcttctgatgcctcttaccttcagtcctttaccaagtgctgtacgaacaacggcacggattgctgcgttcattccaggggcatctccaccacttgtcaatacacctattgtacgaattacttttttgtctgccatgattcattcctccattgtattagtttgttccaattatcttctaaccattatcatttctctccgatgatattgtacatgaattagtgcacgctttcaatgggtttttctataacttttacagaactttcacccagataattcgtcaatctgctcaacaatacctcatctgcggtcacattccagccctttgccaggcgttttaccactttttccttcctgcaatagatgataacttcatccattccttcagatactttcagaatgtcctgaagcattccttcctgctgaagataagtcgctttatccggatattgaagccatagttccttcttcgtctgttcaaacgggatcacctgctcacagatcagtttacttggtgcatcatcttcttcggatacccttccctttataaatactttggcttcttcattcagatacatctgatttttttcaaaatctctcggaaagatcacaacttcgactgatcccaccagatcttccagtgtaataaatgccataactttattggtcttggtatatttgatcgtcttattggtgatcatgccgccgacgatctcttttgcaccgtcatgtacctttgtccttcccgtctcatcatctatctggaaatctaatgtcgttctggaaatgttcttcttccatttttcctcataatcctccagcggatgaccgcttaagtacacacccagcacttctttttcaaatgcaagctttgtctctttctcgtactctcctacatccggaagtggaatgtcgaattccgatttctggtcatcacttacgatgtcaaataatgaaagctgtccggtcatggagtatttccgctcacggttcacctgatccaggatttgtacataaactaccataaactgctttcttgtaccacccagactgtcaaatgctccggatttgataaagctttcaatcgtgcgcttattgacttcttttcctgacagacgttcgataaagtctttcaggttgctgaattctcctccattttttcgttcctggatgatcgactcgatcactggctttccgatactcttgatcgccgccagaccataacggatattgccgccgtcaacggagaagcttccttctcctttattaatatccggtggaagaatcttaattcccatctgtctgcaactgtaaatgtactctgatacttttcccggattgtcgatcacggaagtcataagtgctgccatgaattccaccggatagtaatattttaaccaggcagtctgatatgataccaccgcataggctgccgcatgtgatttgttaaatgcatatttggcaaaatcgatcatttcatcataaatcttattcgccgtcttctcgtcgattccgttggcgatacagcccggcacgccttcgtccggattaccatatacgaaattctggcgctctttctgcatgacatcgccctttttcttcgacatcgctcttcgcagaagatcgcttcgtccaagcgtatatccagccagatcacgcacgatctgcataacctgttcctgatatacgatacatccataagtcggtgccaggatcggctctaactgcgggcagtcataagtgatgctatccggattgttctttcccttgatgtactgcgggatgaaatccatcggtcccggacggtataaggagataccggcaatgatatcctccagattctgcggtttcagttccttcatgaagttcttcattccggcactttcaagctggaatacgccatcggtctttcctgttccgatagacgccagaactgctttatcatcataatcgattttattaatgtctattgtcttaccgctgctgatgcttgccagacgctctgcatcctgtataacagtcagggtacgcagacctaggaaatccattttcagaagccccagttcttccagtgttgtcatcgtaaactgtgtcgtcactgagccgtccgatccaagagacaatggcacgaattcttcaatcgcacgctgaccgatcacaactcccgctgcatgcatggatgtatgtctcggaagaccttccagtcttctcgacatatcgatcagttccttaacctgttcatcttcctgatacagtttcttgaattccggattcatcttcagtgccttatcaagcgtaatattcagctctgtcggcaccatctttgcaatgctgtctacaaatgcatacggaaggtccatgacacgtcctacgtcacggatgactccacgtgctgccatcgtaccgaaagttacgatctgtactacccggtctgcgccgtattttcttcctacataatcaatgacttcctggcgtctctcaaagcagaagtccacgtcgatatcgggcatggatacacgttccggattcaggaaacgttcgaacagaagctgatatttgatcgggtcgatacttgtaattcccagacagtacgatacgatacttccggccgccgaacctcgccccggtccgaccttgattccttgtgttcttgcataattaatgaaatcccacacgatcaggaagtaatctacatatcccatggatttgatgaccgacaattcgtattccagacgttctttcaacgaatcatccccgtccggataccgttctttcaatccgtcaaaacaaagtttattcagatattcccaggaagtatatccttccggcacatcatatttcggcagtttggtgacaccgaattcaatctctacattacagcggtctgcaatcttctgcgtgttctccaacgcctgcagtgcatatggaaataactgcttcatctcttcttcggacttaatataatactggccgccttcgtagcgcatacgatcttcatctgccagctttttacccgtctggatgcataacagaatgtcatgcggttttacgtcttctgcgtaagtataatgcacgtcattcgtcgcaaccagttcgatccctgtctcctgtgacatacggagcagtgactggttcacaatctgctgttcctgcattccgtgatcctgtaattccaggaagaaatttccttttccgaaaatgtcctgataccttagtgctgctgcctttccttcttcatacatgccgcgcaggatattcttctgtacctcaccggccagacacgcactgagcgcaatgattccttcatggaattcctgcagcacttccaggtctactcttggtttataataatagccttccgtaaatcctctggacacgatcttcatcagattatggtatcccagatcattttctgccagaagcaccagatgataataacggtcatccccgcttccgacagcttctttatcaaatctcgatcccggtgcaacatagacttcgcatccgaggatcggcttaatccctgctgctcttgccgcacggtaaaaatcgatcacaccatacatgacaccatgatccgtgatcgccacgctgttcatcccgagttcttttaccctggctacacactctttgattttatttgagccatccaacaggctgtactctgtatggacgtggagatgtgcaaagctcatagctttctcctttcctgattctatccacaatgataaaaaaaggtgccccctcagggaacaccctttcaaacatcactgttcgtcttaatcttcttttccatttccaagaagcatgaattttacaagtttatcgatatcctctggctcatgagcaacgatttccagttccggaatctctccgttagagaaaatgtttgccatagatacatactgagataattttgactttaagttcagtctgtcaccttcgcctgttacaagttcaacttttccttcacaagaatcaactactttgaaaaatccttcgatatctgtaatgttctgtactttcatttctcattctcctttttaatcatcttattcttatcacttttattataccttatttctttttcatttcaatattcttttcagaaatttttatatgtccttctttaagaagtcttccaacggcacgtttgaatgcatttttacttaatccgaattcctgtttgattacttccggatctgctttatcgttaaatggaagctttccaccgtattcttccatacgtttcatgatcatcgccgcatcggcatccatctgaagaaatgctttctctctgacacttaagtcaagctttccgtcttctcttactttcaggactctggcggatacacggtctccgactcttaacctgccaaatgcttctctcttcgggatcagtgcactgtagcagtcatctactgccacgaacactccgaagttatcactcgtctcgtaaatgattccttctacatgatcatcctttttatatggagaatctgtacgaagcttttcgtatactttcattgtcgcacaaagtcttccggacttgtccacatacagtgcgacaagcacttcatcacctttttttacttttgcagtctgttctttgaacggaagcagaaggtctttttccagtccccagtcaaggaacgccccgattcttccggtatctgcaactttcaatactgccagttcatctaacgtgatctttggctcctgcgttgttgcgatcagacggtcagacgaatctttatacaaaaatacttctacaggatctccgacttctacatcttttggtacctgttttttcggaagcaggactttgtcatctttattaccaagatataccccgaactctacttctttaacgatcatcaatcttcttttctttcctaaataatctgttaatcccatatttttcctctctgttcccttttctctttttccaaagtgtatatgttttcttattgtatcagcatctatataagaatgtctatgcaaacttaaattcgatcactgcatacggtctggccttttcattgcaaagctctataaccgttctgtcctcttctatggcaatccttggatagatcacatcaccatataccgctgatttcttatattccacacgcatctggtgcacttctttatcttttggcaatgattccagcgccatctgtacatattggcagttgttgacatgctcattcgtatcaatatgatatctgcgtaccggaaaactttccagttctttcgcctctttcggaagtgcgatttttcttgattcatattccatctcatacggatctcctaccccgtatggtgcaatctccgattcttccggtcttgacggacgtcccttttccatgtccatatatacccacagcgaatttgcatatgctacatcttttccttcactgtctgtcatacagaaattacgttctccaaacaaaccgttaaagtccgtcgcccatgtacttgtctgtatcttttcaccgatcttcggataacgttctaccactacctgccaagatgacaggatccatgcccgctttttttcgctgcagtgttcgattccaagtcccagatcttctgactggaatgtactgcagtcctgaaaataatttacgattcccggcagggtaattcttctggtatgatccacttcactgaatcgtattcttccatctatcgtatattgattgtctctcattttagtctgactcctttgcatgatcttttccgaagaaaaaccactttatcttaaattctgaagtggccgttaccatttcatattcttctgcacttaatgcttctttcagttctttctttccatcttcatctaccactgcacaggttgcattagtaaaacacagatttggataaagtacacaccaccagttatgtccatttcccttcccaagtacaattctcagtgcttcgtaatttccctcgggaaaaatgatatctccataccgtttgtccggaaaatagcaggtggtcacctccgctttcgcccggtatgatactttctcttttttcaatattttatctgctgtatccgtcagttcttttttgtgggtcagggtccatgcttttgtcgcctttgcatcccttctttcggctctggtcatatgtgctttcatatactttagaaccgcatcccgcactttcagtttgattctctgatcatttgcactgtcactttctgcgatcacatgaaaacggaagacttctttggccagtgactgctgtgtatcgctaagttctgcatgtacaatttccatacgccagttcataatgcccgctgtcagtatgaacgatatcagacaggctatgatcaggcagatcgtttctcgtttcatctatgtatctccttcctgtatactgcatttttctgatacaggaagtcttgacacagcttatcttatctatacacttttacagtcttttaattctgttttgtgcggatcacatcgatcacagtggtcacctggttatcaatatgtttacacataatatctgttgccgccttcttctcacctttactgatgtattctatgattgcggcatgctctgcgatcagctgtggatgtgcttcttcacgtttcagatattccacacgataacgatacatctgttctcttaaattattcagaagctggatcagtttctgattgtctgttgccatatagataatgtcatggaaacgtacatctgcttcagcgatctctgtaatatctttactctttaagatcttcttaaaatcttccgcagctttcttcatctcttcgatctcttctttcgtgatcttatcacatgcaagctgcacagccagttcttccagtgcttttcttacttccagaacgtcccgcatattcttttctgtgatctctgctacctcagctccttttcttggaatcatcagtaccaggccttccagttccagtttgcggattgcttcacggatcggggtacggcttactccgagtttatttgcaagctggatctccatcagtctttctcccggttttaactctcctcgcaagatcgcctgtctcaaagtattgaacacgacatctctaagtggtagatattcattcatatttactttaaaattcgattccatgcttatttcctccttgcattatgtatgcctgtcacatacacctgctttgccaattgcttttctcttatctttgctgctgcttttcttgctttctctttgctgtcataaattccaaaaacggtcggcccactgccactcatcatagcattcagagctccctgttctttcattacattcttgatctgttcaataaccggatattcttcgatcgttaccttttccagtacatttcccatgctcgaagcaactttttcgatatcatgagccttcagtccgtctataataccatcaatatccggatgatcctctatctcatgcgaatccagtttttcatagaccagcttcgtcgatacactgatcggcggttttgcgatcagcacatgacatttcgggcaggccggaagtggtgtcagtatctctccgattccttccgcaagaacagttccccgcataacgcagtacggaacatccgctcccaatgtcactcctctttccatcagttctttctgtgaaagaccaagtgaaaacatacggttaatcccgaacagaactgccgctgcattcgagcttcctcctgccattcctgctgccaccggtatgtgtttatcaagggtgatctttacaccctcttttacgtcgaactctttcatcagaaggtctgctgcctgatatgccaggttattctcattcaccggcagataaaaaagattcgtcgacaactctattcccggctttttcgtcttttctatccggatctggtcgtacaggtacactgtctgcatcaccatacgtacatcgtgatatccgttctctctccgccccagaacatccagacccagattgatctttccaagtgccttcaattccattttatccattctatttatctccttacattttgtatacaatgtgcttatagtatactcaaattttgcttaaaaatcaatattttatcgcctttatttacatcttctttttccatatgattcacttcttttatattttccacagtcgtattatattttttcgccagattccacaatgtatccccgtttttcacaaaatatcccacaatgccgggtctgttttccagctcctcggtactcatcggggtgaactttgcggattcaatattttgcaccataacaggctctttctggaaacagttgaatgccagcacagcctttacttccacctctccgtttcccataagtcctacggaaagctgctcaactgtccagtccagttcttctgcttcaggttctccgcccccattctctaaaagatatgtaaacggcaccattccctgccatacaccaaacggcatctgatcatcttccctgacatacaaaaacatcagatgaagaacaccttcgatatggattccatcttcttctgctttcgtagattccggctgtatctttcctttacagtaacagatctgaagaatattgtcttttagttccggaagtgtcagttcttcggcgatcctgcattttgaatggttctgaagctttaagcggaagcacttcttttcttttatatccggaacgcagacatgatccagcatatacatatcttcaagaatctggattttttcttcttcatatacaacaagacgtacttccagtgtcgcctctataccaagaatacgcatttccccgttttcatccatgcgggcttcaacattcacatctgtaagattcagactggcctgatgatacattcccggcacagtccccatacattctatccttccctcatatggaaccgtcctgtttatccagtctgtcttttcttccacactttcatagaggcagaatatattcagttctccttgtatcaggagttcatccgttccaatctgtgtatctgcttttccgcctgtcacatccgtccaaagaatcgtaccgatattctcttttgtcccgctaagagacacctcttctttaatccggtacgtatcctttcctgttgcaaataccttcagaagttcttcttcttttgtctttttaaatacaggattttctccttctatatctgttgtgagctcttctcccacacatttttccattccgatcgtaatctctgcaagtgtcttgatattcagttttcttgaatggattaccgttaccgtaagatcaacatctgctgtctttagtaccagatttccatccggctcttgctcaagatagatcatttcttcaaatggaatccttccttccaggcttgcaggctccggtatcgtttcatctgcagtatacaaaactctgaattccagtttgcctgtcactttcagataattttctacctgtttcatctcttccacctgtaatgtcccgtcacttattataatcctgcctacatccttctttgcatccggaacattataatcatcatcaatatagaactggtcatttaccgtctttccgttctgaaaagtacggatctccttttttaaatactccattgacacttcctgcctcctcttattcatatatgatctgtttatccgtatatggtatctttatgacaatatatggatatgtctttttcttatgcgtcttttctttcttctgtggcccgagaagtgttgtacgtacaaccactgtatgttccgtctcataacactcattcacttcgatgctgtatcctgtcgtttcctgccgtccgtatcctcttactatataaaggtatctgccttcattccccgtatctgcataactgatccacatctccgacttttcggcttctgcaatctcttcttttaatttttcggggatttcttctttctttacgatctcatattctatctctcctgttttctgttcttttaacgtgccaaaactacagccggtaaacagcaacatcactgcgacggctgccacggtccatcttctttttttcatgctgcccttctttctgacacttctattttctctttactatcttacacactatgggtgtaaaaaatgccggatttatgctatcatagaaaatacacagagaacctggcagccattacagaatctttgacaactggcagtttctcttgcatactttggtagcaaaatgaaaataaaggagattaattatgataagacttatttttgtcgccttattcgtagttctatttctgatcatcggtattccggttcttggaattgaatggctgatcggcaaagtcagcaaaaaaactatggattattccagtctgcggctggttcagtgggcatttaagatgatcattaagcttgccggtatcgaacttaccgtgatcggagaggagaatatatcggaaggaccggttctttatatcggaaatcacagaagcttctttgacatcgttatcacttacgccagatgtaagaatctgaccggttatattgccaaaaaggagatgctttctatcccgcttcttcgcacatggatgaaacgcctctattgcctcttccttgacagagagaatccaaaagaaggactgaagaccatcctgcaggcaatcgattatataaaacacggtatttccatctgcatcttcccggaaggcacccggaataaaggggaagaattatccttacttccgttccataacggttcctttaagatcgcagaaaagaccggctgtccgatcataccgatgagtcttaataacacctgtgatattttcgaaggacatttcccgttcatcaaaaagactcatgtcatcttagaatatggcaaaccgatctatccgaaagaactggataaagacgagaaaaagcgtatcggagaatattgcagtaatatcatcagtgaaaccattcataagaatcaggcactcgtatagtgcctggtttttttcttttacatttattcccttaagtgctataataaaatggtataactaaaaaaagaaatgtactgcaaacagcagaaaaaaggagtttgaaaatgagcaaacgaaatcttaccttgctgacagatctgtacgaacttactatgatgcaaggatattatgaaaaagggcagaacgaaaatgtcatcttcgatgtatttttccgccagaacccttgtaacaacggatattctgtatgtgcaggtcttgatcaggtaatcgattatataaagaatttgcattttacttatgatgatgtagactatttaagaggtcttggaatcttcaaagaagatttccttcattatctgagcggcttccacttcagcggtgacatctatgccatcccggagggaacagtcgtatttccgaaggaacctcttctgaaagtggttgctccgatcatggaagcacaacttgttgagacggcgatcctgaatatcatcaatcatcagtctctgatcgcaaccaagacttcccgtatcgtattcgcagccaatggcgacggtatcatggaattcggccttcgccgtgcccagggaccggatgcaggattatacggtgcaagagcagcgatgatcggcggatgtgtcggtacttccaatgtacttgccggacagatgttcgacgttcctgttatgggaacccacgcgcacagctggatcatgagtttcccggatgagtacaccgcattcaaaacttatgcagagatgtatccggacaattgtacactcttagttgacacttacgatactttaaaatccggtgttccgaatgccatccgcgtattccaggaatttaaagacgccggaaaacctctgatcaaatacggaatccgcctggacagcggtgaccttgcatatttatcaaaagaagccagaaagatgttagacgaagccggattcccggaagctaccatctgtgcttctaacgatctggacgagttccttctccacgatcttaagatgcagggggcagccattgattcctggggtgtcggtaccaatctgatcacttccaaggactgtccttcattcggaggtgtgtacaagcttgcagccatccagaatgaagaaggcgaatttgttcctaagataaaaatatctgaaaatactgagaagatcaccaaccctggcaataagacaatctaccgtatctacgaaaaagcaagcggaaagatcaaagctgatctcatctgctttgccgatgaagtcattgatccaaaacaggatctgcttctcttcgatcctatggatacctggaagaagactaagcttgccggtggtacttacaccgtacgtgaaattctcttaccaatcttcaagaacggcgagtgcctctacaaatctcctacattaaaggagatcgcagcatactgccgtgaggagaaagatacgttatgggacgagaccaagcgtctcttctacccgcacagagtttacgtggatctttcccagaaactctacgctgtaaaacaatcattacttgatcagatgactatgacagattaaaggaggacttatcgatcatgaaaattatagtattagcaggcggactcagtccggaaagagatgtatccttactttcaggagccggaatctgtaaaactctccgtgaaatgggacatcaggcattccttctggatgtgttcttcggccttccatgcgattctgataaattagaagacgtattcgaccgcccggacggcggacttgagatttccaaaggaatctctacttctgtaccggatcttgatgcactgcgcaagtcacgtccggacccgtcaccttccgagatcggaccaaatgtcattgaactctgccagatggctgatatcacattcatggcacttcacggttccatcggtgaaaacggaaaactccaggcaacattcgacaacctgggaatcaaatatacaggaccaaactctcttggatgtacactgtccatgaacaaactggttacaaaacagatcttcaagaccaatggtgttccgactccaagaggaacttccctgacatctaagacaaaagatacccctctggacgagcttggttactatcttccactggttgtaaaaccatgctctaacggatctagtatcggtgtatacatctgccacacagaagaagaatattacgatgcgatccacaaatccttcgatgttgacaacacagacgaagttgtcatcgaaccatttatcaagggccgtgaattcgcctgcggtatccttgccggaaaagctcttccgcttgttgagatcgttccaaaggacggactcttcgactatgcgaacaaatatcaggcaggcggcgcttccgagatctgtcctcctgtatctctcgatgaagagacgcaagaattgatccagcgtgccggagaacgtgcatttgaagcacttcgcatggatgtatattcccgtgccgactttatcgtatccgatgcagacggtgaattctactgtctggaaatgaacgcccttcctggaatgacagcagcaagccttcttccgaaagctgccaaggctgccggatatgaatacagtgaactttgcgaggctatcattcaggaatctataaaagcccgctattaaggaggatgaaaatccatgaaaaatctttcaattgaaaatataaccaaggcctgcagaggtaccttccatggtgatgaaagtatcctcagccaggaagtatccggcgtcgtgatcgacagccggaaggtgcagcctggttacttatttgttgccattgacggagaacgtgttaatgcacacaaattcatcccggatactgtaaaagccggtgccatgtgtgtcgtatcacacgaagatctcggtgagacggattttccttatatcctggtagaatccacaggccaggcactgctcgacattgccaagctttaccgtgattctttcgacatgaaggttgtcggaattaccggaagtgttggaaagaccagcaccaaagagatgatcgcatccgttctggctcagaaatatcacgtacacaaaacacttggcaacttcaataacgaatggggacttccgatcaccatcttcgatatgccggaggacacagaagttgcggtccttgagatgggtgtcaatcatttcggtgagatgcgccgtctctcttctgtagccagtcctgacatctgtgtgatcaccaatatcggtatcgcacatctggaattcttcaagacaagagagggaatccttcaggaaaaatcgcagatgatccaggatatgaagaacggtggttccattatcctgaatggtgacgatgacctgctgtccaaaatgagtcctgtcaaaggtgtgactcctgtcttcttcggaatgggagacaactgtgcatttcgtgctgacaatatcgagccacagggacttcgcggaacttcctgcaccatcacattaaaggatggctcttctttcgactgtctggttcctgtaccgggtatccacatggtaagcaatgctgttgcaggtgctgctgtcggatacacactgggactgactgctgatgagatcaaggccggcatcgaatccctgccttccatccctggacgtaaccacatcatcgagaccgatcatatgatcatcttagatgactgttacaatgctaacccaatctccatgaaggcttccattgatgtccttaacatggcaatcggacgtaaggttgcagttcttggtaatatgggagaactcggtgacactgcagaggcacttcatgcagaagtcggtacatacgcagccgaacagaatgtagaccttgtctgtggaatcggtgatctgacacgctctctggtagaagaagcgtccaaaggtgcgaatacagaggcactctggtttgcagataatgaaagctttatccaggctatacctgacatcatcaaagatggagacaatgttctggtaaaagcttctcacggaatgaatttcccacagattgttcacgctctggaagaattatagatttaaggagaacatatttatggattatcagattctcgtccttgatctggacggaactcttaccaactccaaaaaagaaattacacagccgaccctggaagctctgatcgagatccaggaggccggaaaaaaagttgtactcgccagcggccgcccgacacagggcgttatgccgctggccgaacagcttcatctggaagattacggaagttatatcctttcttttaacggtggccgcattacagactgccggacaaagcaggcaatctacaacaagattcttcctgctgattgtattcagggaatctacgaaacggtccgaaaatacgccagccaggggattgatgtcctgacttataccccggaacatatcttatccggtattaaatccaaccaatatacagaactcgaatcccgcatcaatcagatgcctgtcattgacgcaagtgagaactttctggactgcgttccggatgatccgaataaatttcttgtaaccggagatccggctgtattagatcagatacgcaaagaactaagtaaacagtttcattcttatctttcggtctactgttccgaccctttcttcgtagaagttatgccagccggaatcgacaaggcgcattccctgcttaagttattaacgagtatcggactgaccactgaacagatgatctgttgcggtgacggatataatgatctgacgatgatcgaaactgccggtcttggcgtggctatggcaaatgctcagcctgcggtacgggagacggcagattatattacgaaatcgaatgatgaggatggggtactgcatgtgattaatgaatttatgcggtagattgtgagttcatgccttaatgatgaaagcacagatcatggagttttgtgaaggcggaagtttatattttagattattagtttatggccagtgcacaggtccggcattatgccaatcacgacatgagaagccacgataataaatccaatatctataccccctcacaatcaaattccgggatgaagctttcttttgcggcttctccttcctgaatgaagccgtcttccattccaagttccagtgcgtaatctataactttttcgtattctctttttgtaactttacggctgagtaatggatctcctgacacttgcggcattggggtgtattgattcatgatgctgatcaggatctggtcttgataggtttcgagcagatattttatgactgctttagagtttttcacatgtcccggaagtaccagatgtcttacaatcacgcctttttgtatcataccggtgtctttatcaatctgaatgtttcccgtctgatgcagcatttcttttaaggctgctttcgcatatttcggataatcgggtgccccggaatatgctgccgcaagttctgattccatgtatttaaaatccggaagatagacgtctacgtatccatccagcatccgtatcgtctccggcttttcatagccgctcgtattgtaaacaataggaagagacagaccttcttttcttgccagatctaacgcttctatgatctgcaaaacataatgcgtcggcgttacgagattgatattggccgcccctttttcctgcagttccaggaatatttctgacagtctttctaccgtaattgtctttcctgcttttgcttcggctatattatggttctgacaaaaaacgcagcccatagggcagccggaaaaaaatacggctcctgagccagcatctccggatatgcaaggttcttcccacatatgcagcgcagcccttgccacaacgatttccgcggtctcatgacatcttccccaccggccgtttatacggtctgcgtgacaatttcttgggcacagtacgcaatctgttaacatgcttttccttttttctatttctatatggttatctgtatcattctttttactcatatgctttccctgtatcttttttattttccagatatcctcttacagatatctattacttcttatacgcttctactgtattctttatgcagtacttctaacgcatgaatattgtaccacgaatttccgcaacaatttcacctttttctccttctttcccttgtaaatattgaatttaatctgagaaaatgatacaatttttatcacttggagtatagattagtattccagatatattaaggaaggacttgaacattatgagggattatattatcagctgctgttcaacagcagatcttactgaagaacattttaaagcacgcgacatatcttacatctgttttcactttgagctgaatggcaaagaatacgcagacgatcttggaaaatctatcccattcgatcaattctatgcagctatggcggccggagccgatacgaagacttcacaggtcaatgccgaagaatttgaagaatatttcgaacctttccttaaagcaggaaaagatatcctgcatatcacactttcatccggaatttcaggagtaattaattctgcaatgattgcaaaagagaatcttgaagaacgttatcctgaccgcaagatcctgatcgtagattctctcggcgcatcttccggatatggacttttgatggataaacttgccgatcttcgcgacgaggagaaatctctggacgaggttttccgctatgctgaaaagcaccgtctcaacgtacatcactggttcttttctaccgatcttacattttacgtaaagggcggacgcatttccaaaacagcaggtgctatcggaggtgtcttaaatatctgccctcttcttaacatggataatcagggccgtctgattccaagatataagattcgtacaaagcgtaaagtcattcgcactattgtagataagatggccgaatatgccgatcaccagaccgactataatgggaaatgttacatttctcactccgaatgctacgaagatgccagagcggttgccgatcttgttgaatcccgctttccatatctgaatggaaaagtcgagatcaataacgtaggtacgacgattggaagtcatacaggaccgggcacagttgctttgttcttctggggtgatacacgaaccgaataatcatatttataatgaagaatatttattccataactgatagatagtaaagagtacaaaggaggttttcacatatgaaaacagctgttatgacagataccaacagcggaattatgaaagcagaagccgactccatgggaattttcctgattcctatgccagtcattatcgatgatgagacacattatgagggaattgatcttacagaagattctttctacggaagcctgaccggcggacagaatgtatctacatcccagccatctccaggcgatctgatggatctctgggatgatatattagaacagggttatgatgagatcattcatatcccaatgtccagcggactgagtgcttcttgttcaaccgctatcagcctttccgatgattatgatggcaaagtacaggttgcagacaaccacagaatctccgttacgcagagagaatctgtcatgcatgccaagaagcttgcagaagccggaaaatcagcaaaagagatcaaagaagtattagaggccgaagcctataactccagtatctatattgctgtcgacactcttgagttcctgaaaaaaggcggacgcgtcaccgcagccggtgctgcactcggaagtgttcttaacatcaagccgattctcactatccagggtggtaagctggacgcatttgccaagacacgcggcatgaagaaatgtaagcagaaaatggttgaagcattaaagaatgaccgtgagacacgatttaaagacgctgacgacaaacatcttctcgttggtgctgccggctctaacctcacggaagaagaggccgcagaatggaaacagatgcttgtagaagcatttccgaattcttatgtatactatgatccactttcattcagtgtaggatgccatatcggaccaaagggatatggaatggggattagtgtttgttcgaaagattatgataaataatttgctgtttaattcatcatcttggtttaccccggtccataagataaacttggtatcctgtttcggactatgattctacgatgaagaagttgtaagggcgtcagccgcttcatgtattaaacaaaaaaatcccccaggaaatggtatgctccccgtcaagaggacaataaaaaataataaatttttgtatcgtcagccatgctatggctggcgatattttacaaacaggcaaatttcgaaaacccaacgcataattttgacgcttaactatttccaacaccttcttcacattcactggaacggcttcctactttttattccgtgggtgtcgaatgccttacgaattaaatggcaattgcgtaacggttgtgacagcggaagtttaaagtggtcagctgttaattagttgattttcaaggcttttccatagaattgtgtaccgtagtggctttcaccggattacacttctaggcatttcatttattaacattcgcagccagtcacgacttgaaggaaacaatagataaggattattgtgaatgtggaatgccgttagaaacagttagagagtcagaagcaccgttaaaggaacgaagcgaacgtgtttgaggcgaacgccgagtttaagcgtagttcctttgcttttaggtgattctgactctcttagtgtttcttatggtatggaacctgaacaagaagccttatctattgtttccttcaaggattgagaggccgcttccccagttaataaattaaatcccaattaaatcccaaatcaatttaaataacgggtcgcacagtgtgccagacacgcagccccgatcggacacacatcctcattaaactgtacctttgggttatgtgcagaatacttcccgcgatcatccatatatccggcagacagatacatgaaagcggatggtacctgttctgcaatatttgcaaaatcttcagaggcacttgcggatatgcctgggtaaggggttagtttcggaatatccagttccttcatgaagccgacgatctgttcggtaaattccggattgcagatcagaggcggtacttccgagatcatagtgattttagccgttcctccgaaggtttcggctgtccggattgccgtttctttcattcttcgtaccagaagttctctggaagctttatcgttcgttcgaatagttccttcgagaacagctgtatccggaataatattggcggcggttccagcctggaatttaccaactgtcataaggcaggctttggaaggatcaacctcgcgggcgatgatggactgcagagccagatagacatgtgccgcaatattgattgggtcaatggaattctgaggataggcgccgtgcgaaccttttcctttgatttcgatatgaaaaccgtcaacggagtacatcatagttcctgtactgttatacatgtagattccaaccggcatctgccctggagatacatgataggccagtgccgcatctactttcggattctccaggataccatgttctatcatatttttactgccttcgaatgtttcttccgcaggctggaacataaatttgactgtgccttttaactcggcctcattttcttttagcatttttgcagcggtcagtaacatggcagcgtgaaaatcatgtccgcaggcatgtgcttcttttccagtcgggcaggcaaatggaagtccgctttcttccggcattgggagcgcatccatgtcggctcgtaataataagactttgccgccgtttccgacagtagcggtcacaccttcaccacatcgggaaggtgttaagccatatttggtcaatttgtccatcacatatgcacaggccattggcatatgaagtcccgtttctgcattcgtgtggaagtaacgtctgtttttaactgtttcatcattgagctcaagagctctcttataataatccatttattaaatcccttcttttatatatatgcaattttgatgataaaaggtattatatcaaccggatcgtacattatcaaacttctgataaatatttatgaaaaattttataaaagtaccgcagctgtccgtgaggaggtttatattggcgtttttcacaggaaaatattgatttttgcatggatgtttagtagaataaattcagtaatattaggaggaatcaatatgtcagaaattacggtgatagcattggacgccatgggcggggataatgcaccgggtgaaatggtaaaaggagcagtagatgctcttggacgtgaacaggatataaaggtatatctgcttggcaaagaagatatagtgaatgctgaattgcagaagtatacttatgataagaacagactggaagttgtgaatacaacagaagtaatagagactgccgaacctccggtgaatgcgatcagaagaaagaaagattcttctattgtagtcggaatgaagatggtaaaggaaggaaaggctgatgcatttgtatctgccggaagttccggagcaattctggtaggcggacaggtaatcgttggaaggatcaaaggtgtagagcggccaccacttgcgtcactgatcccgacagagaagggtgtagcacttctgatcgactgtggagcgaatgtagatgccagagcctcacatctggttcagtttgccaagatgggttctatctatatggaacatgtagttggtattaagaatccgaaagttgggattgtaaatatcggagcagaagaagaaaaaggtaatgcactggtaaaggagacgtttcctcttttaaaagaagaaaaagaactgaattttatcggaagtgtagaagcaagagagattccgcatggacaggctgatgtcattgtgacagaagcattttcgggcaatgtaatccttaagctatatgaaggtgtcggagcggtactgatcagtaaggtaaaagaaggactgatgtccacactcagaagcaagatcggagcattgcttatcaaaccggcgttaaaaacaactttaaagtcatttgatgcaagtgagtatggcggtgcgccattgcttggattaaacggtctggtcgtaaagacacatggaagctcgaaagcaaaagaagtcagcaatacactgatccaatgtgtgacatttaaaaagcagaaaattaatgaaaagatcaaagaaagtattcaatcggagcaaaaatccgctgaataatatattactaactatgatgagaaaaggagatttgatatggaacttgaaaaattaaaagaaatcatcgctgatgtattaaatgtagaagtgaatgatattacagaggacacaacatttgtagatgatctgggagcagactcccttgatatcttccagattattatgggaatagaagaaacatttgacattgagattgataatgatgacgctgagcagatctctacagttggagatgctgttgagcagatcaagaatgcaacaaataataactaggcagatataaaaagaacgaaagagccctgccaggggcttttttcgttctttaggatggagtttacaatgagcaaagaccttaaagaattagaaggaaagattggttacaaatttgatgactttaccctgtttacaaaggcgatgattcacagctcttatgccaacgaaaagcatctgccaaagtatgagtgtaatgaacgtctggaatttctgggagatgcggtccttgaactggtgtccagcgaattcctgtttcacaataatccgaagcttccggaaggggaacttacgaagacgagggcaagtatggtatgtgaaccggcgctggcattctgtgcaagagatctggatcttggcgaataccttctgcttggtaaaggagaagatgctaccggaggacgaaagagagaatctgtaacatcggatgcaatggaggctctgatcggagcaatttatcttgatggtggttttgctaatgcaaaagagtttatacatcgatttattttgaaagatttggagaacaagaaactcttttttgatagcaagactatcctgcaggaaatcgtgcaggcgaattttaaagaagtaatctcgtatcatctgattggtgaagagggaccggatcataataagattttccgtgttgcggtacatatcggagaagaagaatacggagtcggagaaggccggacgaagaaagcagcagagcaggaggctgcatatatcagcattttgaaactgcatgaaaagaatataaagtaggtgtggaatgtatttaaaaagcatagaagtgcagggatttaaatcatttgccaataaaattaaattcgaattccataatggaatcaccggcattgtcggtccgaacggaagtggaaaaagtaacgtagcagatgcggtcagatgggtgcttggggaacagcgtgtgaagcagttaagaggcggcaacatgcaggatgttattttttccggtactgagaacagaaagccgcttagttatgcatcggtggcgatcactctggacaattcagaccataagcttccggttgattacgaagaagttacggtagcaagaaagctataccgttccggagaaagcgaatatctgatcaatggaagagcatgcagattaaaagatgtaaatgaacttttctatgatacaggtatcggaaaagaagggtattcgattatcggacagggacagattgataagatcttaagtggtaagccggatgaaaggcgagagctttttgatgaagcagcaggaattgtcaaattcaaacgaagaaaaagtatgtcggtcaaaaagttagaagatgaacgccagaatctggtccgtgtcaatgatattctgtctgagctggaaaagcaggttgggccgttagaacgtcagtctgaaaaggcgagggagtatctgaaacggaaggaagaattaaaaacatacgatatcaacatgttcctgctggaaatggaacgtatccgagatcagattcgggggctggaagagaagcttcgtattacaaaaggggagcttgaagaagcaaccagacaatatgcggatacgaagacggaatatgaggcgattgaagaacaggtggaagtgatcgacgcttctgtcgaaaaggctaaccgtcaattaaatgagacgacgattctgaagcagcagttagagaaccagatcgcactgttaaaggaacagattcacagtgcacggatgaacgatgaacatttcgatcagcgggccagcgtgattgattccgagatggatgtccgtgaaggacagatgaaagaacttcagacggagaaggattccattgtaaaacagatggaagaaaaacagtcggaagaagatcagattaagaatgaactgacggaattacaggcgaagatagcacagattgcaggatccgttgatgaaaagaagaatcatatcatggagatactgaataacagagcatctacgaaagctcagattcagaaatttgatacgatgatggaacagatccaggttagaaagtcgcagatcaaccgagagatccttgctaatgacagtgagattgcagaagaaaatgaaaatctgaacaagtatcagatggaattaaaagttatctcagacaagatcatagccctgaacaatgaaaataaagaatatgaaagtaacattaagacgttacaggcgcagatatccagagagtctcagaaattacagattggtcagtctgctttccaccgggagcagtcaagactggaatcccttaagaatattacagaacgttatgacggatacggtaacagtattcgtaaagttatggataataaggaccgtgagaagggacttctgggtgtagtagcagatatcgtaaaggttgaaaaagactatgagattgctattgagaccgcacttggcggtaatatccagaatatcgtaaccgaggatgaagatacggcaaaacgtatgatcaatttcctgaagaagaataagttcggccgtgcaacattcctgcctttaacatcaatccgtgcgaattccgggattaatcgtccggaagcacttaaagaaccgggagttgtcggaacagccaacaaactggttcaggtagagaataaatataaaactctcgcagattatctgctgggaagaacactggtagtagatcatattgatcatgcaacaatgatcgcaagaaaataccaccagtcaatccgtatcgttacactggaaggggaactgatcaatccgggtggttccatgaccggtggagcatttaagaattccagtaatcttctgagcagacgaagagaaatcgaagagtttgaaaagaccgttcagaaattaaaacaggagatgacggagacggaacagcagatctgtggcctgaaagatgaacgcgcagggtattatgaaaagactgacgcaatcagtgcagagcttcagaaagcgtatgtcgtacagaataccgcaaagatgaatgcagatcagtcatctgcaaagatccagagcttcaaacaacaattcgataatctgcgaaatgaagctgcaaaactggatacacagatcaacgagataatggacaatcaggagtctattaatatagaactggatacgtcagaaagtctggaaaatgatctgaatatcaacattgagaaagaacaaaaagagctggaagagatccacgcaaaggaaagctttaagaccagaaaatcagaacagattcatctggaatatgcaggattagagcagaagtatacatttattacggaaaatattatccgtatccgtgaagagatggataaattccgggcagaattggaagaactgacaaagaataagggtggaaattctcaggaaattgccgaaaaagagaagaagatccaggaattgaaaacaacaattgataattccggggatctgtttgatgaaatcaaacttcagattgaacgttcaaaaagagaacgtgaggaattgaataaacggcacaaatcattcttcgaaaaacgtgaagagatctcaaaacatatgacagatcttgataaagaggtttatcgtctggaaagtcagagggaagggtacgaagaagcttctgaaaagcagattaattatatgtgggaggaatatgaactcacactgaatcacgcaaaagaacttaggaatccgaacctgaccgatcttgcagatatgaagagacggatccaggagttaaaaggtgagatccgtgcactgggtaatgtcaatgttaatgcgatagaagaatataaaagtgtatccgagcgttatgaattcctgaagggccagcatgatgatctggtagaagcagccgaaacattggaacagattatcgaggaacttgataatgccatgcgtaagcagttcaaagagcagtttgccagaattgcagccgagttcgatcaggtattcaaggaaatgttcggaggcggaaaaggaacgctggaacttatggaagatgaggatattctggaggcgggtatccggatcattgcccagccgcctggaaagaagctgcagaatatgatgcagttgtccggtggagaaaaagcattgacagcgatagcacttctttttgcaatccagaatctgaagccgtcaccgttctgtctgctggatgagatcgaagcggcactggatgataataacgtagaccgttttgcacaatatttgcacaagttaacaaagtatacgcagttcatagtaatcacacatcgacgtggaacaatgacggcggcagacagactgtatggtatcactatgcaggaaaaaggtgtatctgcactggtatctgtcagcctgcttgaaaatgaactggataaataggaggaagatatgggattttttgaaaaactggttgccggtcttggtaagaccagagacaatattgtatcaggaatggacagcatctttcacggattctcccgtatcgatgatgacttttacgaggagctggaagaggttctgatcatgggagatcttggtgtacaggcaacatatgatattctggatgatctgaaggcaaaagtaaaagaaaaacacatcaaagaaccaatggaatgccgggaacttctgatcgaaagtatcaaagaacagatggacatcggagaaacagcatatgaatttgaaaaccgcacatccgtagtgatggtaatcggtgtcaatggtgtaggaaagactacaacgatcggaaagcttgcaggaaagcttcgtgcagagaataagaaagttgtaattgcagcggccgatacattccgtgcggcggccggagaacagttaaaagaatgggcgaaccgttcgcaggcagagctgatcggcggacaggagggatctgatccggcatcggttgtgtttgatgctgttgcggcagcaaaggcgcggcatgcagatgtgctgatgatcgatacagccggacgtctgcacaataaaaagaatctgatggaagaactcagaaagatgaataagatcattgaccgggaattccctgaggcatacagagagacattggttgttctggatgcaacaacaggacagaatgccctgcagcaggcgaaggaattcaacgatgtggcagagattacagggatcgttttgacaaagatggatggaaccgcaaaaggaggaatcgcagttgccatccatgcagagctgggcgttccggtaaaatatatcggtgtgggagagactattgacgatttgcagaaatttaatgcagatgatttcgtgaatgcgttattcgaaagaccgaaagatgatgaggcttcagaagaggtttcagaaaacgaataagaggaagagaggaagtacgagatgttaacattagaaaaattcaaacaggcgagtgcaatcgtaaaagaagtaaccctgccaactaagctggtatacagcgaatacttaagcaaacagacaggtgctgatgtctatctgaaaccagagaatatgcagtatacaggtgcttataaagtacgtggtgcatattacaagatcagtacaatgagcgaagaagacagaaagaaaggtcttgtaactgcgtctgcaggtaaccatgcacagggcgtggcatatgcagcaaagaaattcggctgcaaggcaacggtagttatgccgacagttacaccactgatcaaagtaaatcgtacaaagagctatggagcagaagtcgtattacacggagatgtctatgatgatgcctgtgcatatgcaatgaaactggcagaagaagaaggatacacattcgtacatcctttcgatgatctggatgttgcaacgggacagggaagtattgcaatggaaatctttgaagaacttccggacgtagattatattctcgcaccaatcggtggcggcggtctgattacaggagtttcgacacttaccaagatgctgaatccgaatgtcaaagtaatcggtgtagaaccggctgccgctgcaagcatgacagaggcattgaaagaaagacatccggtaacacttgcaagtgccaatacgatcgctgatggtacagctgtaaaacgtgtcggagaaaagatcttcccatatgcagaaaagaatatagatgaagttattacagttgcagatgatgatctgatcggtgcattcctcgatgtagtagagaatcacaagatgatcgtagaaaattcaggccttctgacagtagcggcgctcagacagcttgatctgaaaggaaagaaagtcgtatccatcttaagtggtggtaatatggatgtgattacaatgtcctcgatcgtacagcacggactgatccagagagacagaatcttctctgtatctgtacttcttccggacaagccgggtgaactggtacgcgttgcagctacaatcgccaaagcaaatggtaatgtaatcaaactggagcataaccagttcgtaagtaccaaccgaaacgcagcagtagaacttcgaatcactctggaagcattcggaaccgaacacaaacaccagattatgaaagccttagaagacgagggcttaagtccgagagaagttaacgcaaaactttattaataatatataaaaaatgattatggaatccccataatcattttttttgaataaatatccataatagaacttgacaacacatgtattattgtatacaattatacatgttgaatttagtactttactacgaaaaaatattttagaaagcaggcgatggaaaatggaaaacaggaaagtatacctggatgatcatacaaatttattgcaactggaagagcacatgtacccgttggtggatgtgaagacaccgaatgtatttcgtaatctgttccattatgacgagattccgaaaatcgcattcaatgaccgaattgttccgcattgtatgccggatgagatctggatcacagatacaacattcagagatggccaacaatcacgtgccccgtacagtactgagcagatcgtaacattatatgattattttcatcgtctgggtggtccgaagggaaagatcagacagtgtgaattcttcctctatagtaaaaaggacagagacgcagtctacaaatgcatggaaaaggattataaattcccggagataacaagctggatccgtgcgagcaagaaagatttcgaactggtgaaagagatcggaatgaaagagactggtattctggtaagctgttcggactatcatatattctataaactaaagatgacaagacgtgaggcaatggaacattatctgtctatcgtaagagaatgtcttgagacaggaatcagcccgagatgtcatctggaagatatcacacgttccgacatctatggattcgtcattccattctgtctggaacttatgaaactgatggatgagtataagattccggtcaagatccgtgtctgtgataccatgggatacggggtcaactatccgggagctgtaataccaagatctattccgggaatcatctatggactcagagtacatgccggtgttccaagcgaactgatcgaatttcacggacataatgatttctataaggcagtcagcaattcatcgacagcatggctttatggtgcgtgcggtgtgaactgttcactttttggaatcggagagcgtaccggtaatacaccactggaagcgatggtgttcgaatatgcacagcttcgtggcacactggatgggatggatacaacagttatcacagagcttgcagattattatgagaaagagatcggatatcatattccttcaagaacaccttttgttggtaagaactttaatgtaacaagggctggaatccatgcagatggtttattgaagaatgaagagatctacaacgtatttgataccggaaaattcctgaaccgtcctccgcttgttgcaatatctaacacatccggacttgcaggtattgcacactggatcaatacatattttaagctgccggaggacaagaaagtagataagaactcagaacttgtaagttctgtaaaagaatgggtagataagcagtatgaagaaggacgagtaaccgttcttacagacgatgagttgatcagagttatcgacgaaaactgtaagagaattggtgtggaattgatatagcagaggtgtttttaatggaagaatatcaggacagatccttacgaggaagagtgttccggcatctgcgggaagatattctgaatggggtatataaaaatcatgaagaattaagggaagtaacaatcggtgaagaactgggggtaagcagaacaccggtaagagaagccttaagacaattggagttagaaggactggttacgatcattccgaataaaggtgcgtatgtgacagccattaccagaaaagatgtgaaagatatctataagatacgttcgcaactggaagggctgtgtgccaactgggcaacgaaatatattacggatgcgcagattgaagaactggaagaagtgattcttctgtcagaatttcatttgcataagaaaggatccggacagattgaacagatgtcagaaatggatggtaagtttcataagatattgtatgaggcatccaacagcaggatcctggaacatgtattaacagattttcacaagtatgtacagcttgccaggacgatgtctattgaagcaccggagcgtgccgagaaatcaatagaagaacacagagaaatcctggaagcaatcaaggcaaaagatgcggcaaaagcagaacagcttgcaaatgaacatatattacacgtgatggaaaatctgcatctggaagaataataaaagatgccgcgaacagatagaaaggagacaaataccatggcaaaaattaaaatgacaacaccgattgtagagatggacggagacgagatgacaagaattctctggaagatgatcaaagaagatcttctggagccatatattgaactgaacacagaatattatgatctgggtctggaacatagaaatgagacagatgatcaggtaacaatcgatgctgctaatgcaaccaagaaatataaagttgcagtaaaatgtgcaacaatcacaccgaatgcggcacgtatgaaagagtacgatctgaaagaaatgtggaggagtccgaacggaacgatccgtgcaatacttgacggaactgtatttcgtgcaccgattgttgtaaaaggcattgagccatgtgtaaaaaactggaaaaaaccaatcactattgcaagacatgcatatggagatgtatataaaaatacagagatgaagattcctggacctggaaaagtagaactggtatacacggcagaagacggcacagagaccagagaactggtacacaactatgcaggaccgggtgttgcacagggaatgcataacttatgcggatctattgaaagctttgcgagaagctgctttaattatgcattggatacaaagcaggatctgtggttcgcaacaaaagatacgatctctaagaagtatgaccatacattcaaagatattttccaggaaatctttgacaaagattatgccgagaagttcaaagaagccggaattacatatttctatactttgatcgatgatgcggttgcaagagttatgaaatcagaaggcggatatatctgggcatgtaagaactatgacggagatgtaatgagtgatatggtttcttccgcatttggttctcttgcaatgatgacatctgttctggtatcaccggatggaaattatgaatatgaggcagctcatggaactgtacaacgtcattattacaagcatctgaaaggggaagagacttctacaaactctgtagctacaatttttgcatggacaggtgctcttagaaaacgtggtgagatggatggaaatgccgaattggcagcattcgcagataagcttgaaaaagcaaccattgataccattgaagaaggtaagatgacgaaagatttggcattgatcacgacactggaaaatccaaccgtattgaacagcgaaggatttattaaggcaattgctgaaaaattaaaatagataatatatatctacaggacctgccaccggcagttccttacgaatgcatggcaatataaaagcccgccccagaagctttctggagcgggctaaaaagttgcaaatcaggcgtttaagcgtcttctgctaattcctcccatttcatgtataattcttctaattcttccgctattgcggctttttcttttgcaagttcctggcattttacagagttggtgaagatatcttcctgaatcatcagggcatcgatctcactatcacggtcttccagttcgccgatacgttcttcagtctttttaagctcattctgacgtttgcgaagtcttgcctgggcttccttttgctcctgccagctgagttttgactcggatacattcttgtctgtactgttatctgaaacggatgaaggtgtagaggcttctccggcatatgcagtagtgagttcttcttttttctccagataatagtcataatttccgatataatttacaaatgtatgattgacaagatccagaatccgtgatgcagtttgattaatgaaataacggtcatgagagacataaagtacagtaccggtataatcattcaaagcattctcaaggatttctttggatgcgatgtccaaatggttggtcggctcgtcgaggatcaggaaatttgcttcagagagcatcagtttcgcaagagatacacgtccgcgttccccaccgctcaaagaactgatctgtttgaagacatcatcaccggtaaaaagaaatgctgcaagcacattccggatttccgtattcgtaagagtcggataatcatcggaaatctcgtcaaaaattgttttttccatatgaaggacatgatgttcctgatcgtagtagccaatcttaacattggagccaagtgtataagtaccggaatcagcagataccactcggtttaagatcttaagaagcgtagtctttcctgttccgttatcaccgattactgcgacatgttcaccacgtttgatctcgagattaacgtctgtaaaaagttcctgtccggggaaagatttgcttaaatgttcaatagtcagaacatcattgccacttacacaggatggttccagtttcagatgtatatctgtattaacttctatcggtttttcgatggtctgcattttttccaacatcttttcgcggctttcggcacgtttgatggatttttcgcggttgaaagaacgaagcttttcgataaccgcttcctgatgcttgatttcctgctgctggttaagatattccttcaggcgtatgtcgcgaagctgctgcttctttgctgcatagtcgctgtaatttcccatataagtacgaagttctccaagctcgatttcaagaactttagtgacaactttgttcaaaaaataacggtcatgagacacgatcagcacagctccctgatagtttagaagataggtttcaagccatgcaattgaattcagatccagatggttggttggctcatcaagaagcaaaatgtctggtttcgttaacagaagcttgccgagagatacacgggttttctgtcctccggagagagtgtcgacgggtttggtgaaatcattttccgtaaatccaagtccctttaacacaccggtgatctcactttcacaagaatagccattctcacgttcgaaagcggccgtaaggcggttgtaagtttccagacggtcgttcaaggcgtcgccggagagatgcttaagttccatctcgatctcgcggatacggcgctccatagcgattatatcggcctttgcggtgcggacttcttcgtagatcgtattaccgctttgcatctcttgatgctgggcaagatagccaagtgtcttaccttttgtcaggatgacgttgccgtcatccggggctgattcgcctacaatcattttgagcagagtggacttaccggcaccgttcggtccgacaagagctgctttttcgtgatcttctatatggaaggatccatctctgacgatgaggtgttcaccgaaagatttctggatcccgtgacatgctaatatcatatatttcctcctgagttatggataattgatacgttggtattctcaaaatgcatttacacatgctactttattataacggaaattgcataaaattcaacaatagtttgacaataatctttcaattttatataattattttagactatgattggaagggtgaaaacattggaagaaagagagatttctcgtgcggtcataagaagattgccgaggtattacagatatttgggcgaactgttagaaaatggtgtagagcggatttcttcgaacgatctgagtaagcggatgaaagtaacagcatcccagatccgtcaggatcttaataatttcggaggattcggacaacagggatacggttataatgttaagtatttatacacagagattggaaagatattaggattggaagaagaccacaatattattatcattggtgcaggtaatcttgggcaggcactggctaattatgcagccttcgagaaccgtggattcattctgaaaggaatctttgatgtgaatccaagacttcagggagtatccatccgtggagttccgatccgtatgatggatgatctgaaaacgttcgttcagaataatgagattgatattgcagttctgacgattccgaaagagaaagcaattgaagttgcgaatatgctggttgagaacggagtacgtgcgatctggaactttgcacatacagatttgaaccttccggataatgttgttgttgagaatgtgcatctgtcagaaagtctgatgcagttgtcatacaatatcagtcgttacaaagaggaccataaataaactataatacaagaaagcgtgtaggagtagtctggaatacggacatatttttacacgttcttttgttgcagagatatatctgatgggagatgaatgaatatatgaaacttctggttaatgctgcgcagatgaaggctgccgatcagtacacgattcaggaactgggcattgcatcactggaattaatggagcgtgcagcaaatgcctgtgtacagacgatgcaaagtaagaatctggatctttcttctgtctgtgtggtatgtggatcagggaataatggcggagatggatttgccatcgccaggatcttgaagaatatggggtgttctgtggatacttatctggtcggcaatccagagcattgtacaccggagacacgggaacagataagacgtcttaaagaatgtggtggtaagatcacagaagatatcccgcaggataacagctacagcatagtgatagatgccgtgttcggagtcggactgagccgtaagattgaaggtacatatcgtcaggtgattgaacgtatgaatcagatgcagggtacaaaatttgcagtagatatcccatcaggactttcagcctctacgggatgtgtgcttggttgtgcattccacgcagatgatacagtgacattcgaggtgaaaaagatcggccttgaactggcgcagggcagagcatatgcaggaagagtaacagtagcagagattggcatttcgcatgagccgttattacaggatgcagatgtgatccattcttttgaaagagaagaatatcgtagaatgcttccggaaagaccggaagattctaataagggaagttatggaaggcttcttgtgatcgctggaagtaagggtatggcaggtgcggcatatctgaatgcccatgcggcttatatgacaggagccgggcttgtcagaatctatacaccaaaggacaaccgcgagatattgcagacacttctgccggaagcgatcataacggcttatgatgaatttaataaagaagaagtactaaagcttcttaagtgggcagacggtgtgtgtattggttccggcattggaagaagtacaacatcggagaagttattgcggacggttatagagtacgtggatgttccatgcctgatcgatgcagatgggttaaatcttctgtcagataacaaagatcttcttgatcggctggcagaccggaagttcatatttacgccgcatatgaaagagatgtctagacttacaggcatccctgtggaagatcttagagaagaccggatacagatcctgaagaaattcgctgacggatatcaggtaacctgtgtattaaaagattccagaacactgatcgcagataaggcaaatgaaatctgcctgaatcttaccgggaacagtgcgatggcaaaagccggttcgggagatgtgctggccggtgtgatcgcaggctttatggtgcaggaaaaagatacgaaaaaagcagccagattaggtacatatgtacatggtttggccggtgaccttgcaaaatttgaaaaaggcgtatatagtgtaatggcaagagatctgatagaatatatcagtaaagcattaatgaaactggaggatgaatagcagtgaaacattatacaagagttttagccagagtcgatttagatgcggttgaatataatatagagatgatgaagaaaaatattcagaaagatacacagatgatggcagtcatcaagatggatggttatggacatggtgccgttcagattgcaaagcttctggaacccaaggattatatctggggttatgcagtagctacgctggatgaagctattttattaaaagatgcatgtttgaagaaaccggtattggttcttggatgcattttcccggatcagtgggatacgatgatccgcaatgaagtacgtatgactgtctatagttatgagatggcaaaagaagtgtcagagcttgcagaagccatgggctgtaaagtctatgtacatattaagcttgacactggaatggcaagactgggattccagattacagaagagaatgccgaagaaatcgcaaagatcagtaaactgccgaacctggtaatggaaggaatgtttacacatttttccaagtctgatgaagcagataagacatttaccaatgagcagcttgataaatatctctggatgaaagaagaactgaaaaaaagaggtgttacgttccagtattatcattgctccaacagcgcaggtatcattgatctgaaagaagcgaatatggatattgtacgtgcgggtatcactacatatggcatgtatccgtcagatgaagtagagaaagaacgggttccgttaaaaccggcaatggaacttatcagtcatgttgcccatgtaaaatggctgacagaaggaaagcctgtaagctatggcggaacgtatgttacaacccgtccgacaaaagtggctacgattccggtcggttatggagacggatatccaagaagtctgtctaataaaggatatgtgctgatccatgggcagaaagcaccgatcatcggacgtgtatgtatggatcagttcatggttgatgtgacagctatcgaggacgtggaattcggagataaagttgtaatattcggacgtgacggaaaggagttcctgtcagttgatacgctgggagaactttccggaagatttaattatgaattcgtgtgtgtattgaacaaacgtattccaagagaatatatccgccacggagaagtcgtagaacaggtagacagtttttaattgccgtgcattcgtacagaagctgccggtggcaggttctgtagatatcgtaaaactttgcagaatacatctgagaaaaaaggataatcggtcgagggcatgaccaagcaaggtgataggtaggatgaagaaaatatttcttgtatgcagttttgaaggtatataaaaataaaaaagcaagtaaaaacccttgtcaaaagagacaaaagggtttatactatataagtattcctcgatagctcagtggtagagcattcggctgttaaccgaagggtcgttggttcgaacccaactcggggagttaaagacagaaatcgatttgatttctgtctttttatattataaaagagtattatataatgcttaacgcggattaaaaaagtattaaaaatagtttgataataagatgcaaaaagggataaaaagaaggataaaaagatgaaatatattttacaaacggataatgaaacaatagagattccgattatacgatcaaaaaggaaaacactagggttagaagtgaaatatgatggtacagtaaatgcaagagttccaatgcgggcaccaagagagattatagaaagatttatccgggaacatgaagcgtggattaccagaaagcggcaggaatggagcctggctggaaacaatcaggatgatgtggcaggagagtttggagaaagaaagaaacgtggggcgaatgcggtagatccgtcgaagattcttccaccggtcgaaacgaaagaaggaaaagcgaagatcagacaatatatagaaaggcaagttgaatattacgcaaaaataatgggtgttacatatggaaggatatctatgcgtaatcagaaaacacgatggggaagctgtagcagcaatgggaatctgaatttcaataatcggttgttatttgtgccggaagaactggttgattatgtagtggtgcatgaactggcacacagaaaagagatgaaccattcgaatgcattttggaatgtggtagagaagtatatgccggattataaggaacgcaggaaaaaactaagggagtatcatatagaataagaaggaatacacaacaatcataagaaaacatttacttaaagaaaaatatatagaaaacttctataaatcataatgcttatagaatatgtgcgaaagatacaaaaataaacaaatgctttgtaggtctatgacgatgaaaaataatttgaaaatgttaaaatgttaacttgttaggaatagaaataacaggtctggagtaggtgaaatgtttaaagtaagttattttttggaagtcctgccgattattgcgagtaaagttaatattacatttgaattaacggtagctgcgacaatattcgcactgattgtgggagtcattattgcaatcatcggttattataaaattccggtgttgtatcagctgaccagagtgtatgtctctattatgcgaggtacaccggtcgtagcacagttatatttcttctattatggaattgcattatacagtgcatttgtaagaaatatgacacctcttatcgcagtagcggtagttatgagttttaatatgggagcttttatgtcagaaagtatcagaggagcattgttatccgttgatgaaggacagaaagaagctgcatattcactgggaatgacgaattttcagctggttacgagaatcgtaattccacaggctgtacgtgtggcattgccgccgctttttaacgacatcattaacctgatcaagatgacttcacttgcatttatgcttggggtaccggatatcatgggagccgccaagattgagggagccagaacgttcagatattttgaaatttatgcggccgttatgctggtgtactggctgatcatatttgtgcttggaatcttacacaaattattagaaaagaaatgtgcaaatatgtattaagacaagatcttaaatggaacaaccattgagatagatgcattatcatttatatgacaaagaggagattaagtattatgaaaagacgagtattagctgctttattagtaactatgatgacagttggagttgttgcaggatgcggaagcaacgcaaaatctgatgattcagataagaaaacaagttctgattctaagagtgatgacaaaaaagattccggaaagaaagtaacagtcgttacatcaggaacaggagaaccatacagccttatttctgatgatggaaaatggacaggtatcgacgcagagatgtgggatgaaattgaaaaacgtaccggatgggaagtagaagtaaaacaggcttctttcgatgctatgtggggagaactggatacaggacgtgctgatgtagttgcaaactgccttgcagtaaaagaagaaagaacagacaaatataatgcaacaatcccatactacggagattcacagtgcattatcgtaaatgatgattctgattacaagacatctgatgatttaaaaggaaagactgtaggatgtacaaacggacaggctgcacagacaatcatcgaagacatggcgaaagaaaaaggatttacagtaaaactttatgaagacagtgctgtaggtatgaacgatctgaaacttggaagaattgatgcatatgcgaatacaacaacaaatgtaaacgcatttacacataacaatacagatgcaaaattccgtttctttgatgaacagcttctggcaaataatgtagcttatttcctccaaaaaacagatgacggagataaactgacaaaagaattagatgatgtaatccaggatatgttagatgacggaacagtagcaaagattactgaaaaatggatgtatgctgatatgacaaaattaatccagaaataagaaaagtcaggaagattaaaacgtatgggaacagaaacacagttggttaaggttgaacatttatataaagaatttgatgaaaatacaaaagtattagaagatatcaatctgacgatcaataagaatgaagtgattgcaattttaggaccttcgggaactggtaaatctacattactcagatgtctgaattacctgacagtaccgacaaagggaaaaataacaattggtgatgtaacggtagatgcacagaaccatacaaagaaggatgtaatagaattgagaaaacattcttccatggtatttcagggatataatcttttcaagaataagactgcattagaaaatgtaatggaagcgctgaccgttgtacaaaaaaagtcaaaggcagaggcggaaaaaattgcgttagaactgctggataaggtaggaatgagtgaaagaaaggacttttacccatcgaaactgtccggaggacaacagcagagagttggaattgcaagagcacttgcagtaaatccgaatgtggtattatttgatgagccgacatcggcattggatccggaactggtaggagaagtactgaatacgatcaaatctcttgccgaagaaggaacgacaatgattctggttacgcatgagattggatttgcaagagaagtagcaagcagaatcctgtttatggacggaggaagaattgcagccgatggaagaccggaagaaatcatcgatcatccagagaatcaaagacttcagcagttcctgaattttgttaatcgtaaatagaatggctgaaaggtctgcacagggtttgtgcaggccttttttgaggagttggtacaatgagcaatataaatgataagataagacaaattgcaaaagagacagaaccggaactgatccgcatcagaagagaactgcatcagtatccggagcttggaatcgatcttccaaagacacacgagatcatcagccgtgagttacataaaattccgggccttaagataagagaacatgctgccggtgggtatggtctgatcgcagaacttaaggggaagaaagagcatgggaaaaatgttttgctgcgggcggatatagatgcgcttccactggaagaaaaagtggaaagcacttacaagtccaggcatgacggacgtatgcatgcatgcggacatgatggacatgcgacatggctgatcggtgcggcaaagattctggcacagctgacagatgaattcggtggatgcataagattcgcatttcagccgggggaagaagtcggacttggcgcggatacgatgatagaagaagataaagtactggaagatccgaagatggatatggcatttgccgcacatggatggccgtctgtagagagtggtaagattggaatcgtgagacgctatgcatttggctgtgtgggagattttaaagtcagaattatcggaaagaaggggcatgcatcatggccggagcagacggttgatccgattgcggcggcaaatgagatctaccagcatatcccggcaatactgacacgtacagttagcggaacagagcctaagatcatgtcagttacttatatgcaggcaggggatgtgaatgtcagaaatatcattccacaggactgcgtatttggcggaacgatgagggccgtaaaacgagaagttctggaaaaaatgaaagcagaactggaaaaagagatcaaaggaatctgccaggtatacggaacttcttatgaggcagatatcaggattcatggtggaagtgtaaagaatgctccggaattattaaacggagtgaaaaagtcagtagccgatgtacttggaaaggaaaatgtttatattatagaagaagataatcttggcggagaaaattttgcagaatatagctgtcgtgttccggcggtatatatgtttattggaattaaaccggaagagaaagaagcgattccgggtctgcacagtccggaatatcagtttgatgatacggtactggcaggagcagccgctgcatttgccaatattgcgattcacggctgtatgggggaactgaaagaaaattaaaaagaacaggagaggtatcagaatggaaaagctggtttatgtagaccgaagaaatacaaactgtaataaatgggacggacagcagaaaatgttcggagaagaaggacttcatgcaatgtgggtggcagatatggacttccgtgtaccggagtgtgtagtcagtgcactgagggaatatgtggaatccggagtgtatgggtattataagattccggatgcttattatcaggcattcattgactgggagagggagcatcacggatatgaagtgaaaaaagaatggatccggttttcaccgggagttgtagcaggattccactggctgttgcagattctgacagaagaaaatgatgcagtaattgtaaatacaccggtatactatccgtttttagacgcagtaaagaacaatcacagaaatttaatctgttccgatcttaagaacgagaatggagaatactcgattgatttcgatgattttgagaaaaagatcacagatcatcaggtgaaattatttattttgtgttcaccacataatccggcgggaagagtatggaaaaaagaagagttaaagcagctttttgaaatctgcagagcgcatcaggtgtatattatatcagatgagatccatcaggatctggtatttggagaaaataagcatatcccatctttgtcaaccggagagtatgatgatattatggtatcgatcgtggctgcatcgaagacattcaatattgcgggtgcacagaattctatggtgatcattccggatgaaaaacttcaggaaaagtgggatgcttatgtaaaaggcaacagagtactgggaggaaatgcttttggttatgttgcagcgcaggctgcatatacaggaggcaatgaatggctgacactggtactggatcagatcgaagagaattatcaatatctgaaagcagaacttgcggaaaaacttccggaggcggttgtgactccgctggaaggaacgtatctttgctggatcaatctggaagcatatgtaagtgcagatgagatgaaagaagtgatccagaagaagtgccgtctggccgttgatttcggtgactggttcggtggagaacggtttggtacgtttataagaatgaatcttgcgacatcaaaagagaatgtagagattggtgtcaatgcactgattgcgaatttagtgagaaaatagttatagaaattatcaataagacgaaatcactggcatatgattttctatttgacagaaataattttctacgagaaaatatctgtatatggagtgaaaaagatatgtacgagattgaagtctgttataaaataatttttgaagcaatgctggaaaaaccagtattaaaaagtattgcagaaaagataaatgaatatacaggtgcgaaagtaatatttgtgtcagggacaggaaaaatcctggcatattcgcatacctgtgaacaggatggcagcgaatccatcagatggaagcatgtgacattttcagactataagaaattctgccaggaagctgatacgaaagaacatcagcttgtacttcaacctgttgaaacaatgggaaggttagctggatatgtagttattctatatagtgaagaggagtcccggcgtttttttgaagaattgggaagtgtgatcggacaggcagtaaggcatcagtttgaagatgtggtaaaagagacgatggttttacaaccgatgcgcgaagccatacttgcctggagtctgtttcatgggaaagcagatgggatccagcagacagaaaaaatatggacaggacaatgcatagaagtattaatgttaaaaaaggatattcaggaaaagaatgtattgtggataaaagaaatatgggatagatattgtatctgcgaagagacagataggatccagatattattttatggattaagagcgaaaaatacggaagaaatttaccagaagatcatggaaaaaaagattggttgcagcatcagtgaaccatttggaaaattagacagatgtgttacaaagtacgagttgttaaaacgtatggcgatggtgagcggactggaaaatgatccggttatgaaacgggaaaaggaatggtcggtacagggactttatacatatacaacaccgctctttaaagaagcgggattaagtgattaccggttgttacggctgcttcaggaagacagagagaataatacggatctctactatacattaaaggtatatctgctgaatgaaaataatgtaacaatggcggcagacagccttcatattcacagaaatacactggtctaccggttaaagcagatcagggaatgtatagaagctgatatcaatgataacgaaacagcaagggaactgctggcatttatgatgatgtatgacgtgtcgagacaagatcagaaaaggcaaaagtaaggagagcatatatgaaactggtgcagaatttaccagagatatttgaagagtttggagaaaaaaagagagaagcatttctggaaataaaagaatataaggataagggaattccggttatagggatgtattgtgcctatttcccgacagaacttgcaatggcagcgggagcaatcccggtaggtctttgctctttttcaaatgagacgatcacggcggcggaacgggatctgccgaaaagtatgtgtccgctggtaaaatccagttatggatttgcgatcagtgacagatgtccgttttttcattttgcagatctcgtgatcggagagacgacatgtgacggaaaaaagaagatgtacgagctgatgtcggaattcaagccagttcatgtaatggaacttccgaacagtcaatccgaaagaggacttgttttctggaaaagtgagattattcgtacaaaagaatatctggaagaattctttcatatagtgattacggaagagatgatccgtgatgcagtacatttaaataatgagatccgtatgtcgttgaagaacctttgcgaattgatgaaactggatccggctcctgtaaagggggaagatatccagaagatggtgcaggggagtaaatatcgattcgattttgcaacaactccgggagtggtgaaagaagtgatcgataagatcatgacagaatacagacagggaaagcatctggaaaaacgcccgagaatactggtgacaggatgcccgattggcggcgacagcctgaaagtgatccgtgcgatagaagataatggcggagttgttgtggcgattgaaaattgcagcggtgtgcggacactgggaaatccggtggaggaagactgcgaagacatctacgaagccattgcaagaaaatatctgtcaacgggatgttcgatcatgacaccgaacgataaccggatcgatctgattggtgagatcattgatgaatatcatgtagatggagttgttgagatgatattgaccggatgtcatgcgacaggggcagagtctgtttatatcagaaaatttgtaacagaagagaaacatctgccatatattgccattgatacggattattctactgcagatcaggggcagattgctaccagactgacagcatttttggaaatgatccagccggggacagatgaagatctggatatcaattattgctataagattgtgctggcagggatgacggaacaaaggtcaagagcagaaattttggaagaaatatggaaatatacgcatattccggtatgtataaagagcggggaacaagaaacagaagaatgggttggaatcagcagggaagaagcagaacaggaatgtggaaagagaatggaatataaactgtcagaaaagaatggagttgtgatggcagttgttccagagggcgtcaataaggaaagtgtggaagaactcttagaattgttggcaaaaagctatcacatgagaacgcatacccgtgagacagaagaaagagaaattccggattatatgtggattataacggaagaaccaaaaaatcttatacatatcggacgggatctgacaaaacaggccagagtgaacaaaatgctcaccggattgaagctaaggcagatacaggataatgaattatttatatcgggaatggatggcaaagaagccagaaacggtataattgatgtgtgtcgcaaatctatggaagatgaagatggaaaaataatgatcggaaatggattttcggactgggggaaaaaagaagagaacagacagttgcagtggcaagtattgaatatggctgtaagacagaaacagaaagaacaggtactgcttgtggaaaattattaccatgaacttgcaattagttgtatcagtgagaatctgggacaggaaaacatatatctggaagaattagagattttgaaagaggaggataggaaaacgggaaaagaactttataagactttgtactggtaccttcggatgaaacggaacgttgcacagacggccgcaagacttaggatccacagaaatacattactgccaagaattgcacggatcaatgagcttttagatctggatgaaaaagacggaatggaatgtgaaagaattctgatgggaatggaaatagaaaagttaaaaaatgactgatacgcagggtatcggtcatttttttaattatgtttaaattcttcagacattcgatacccacggaataaaagttaggattcctaacttttatgtaggtccaggtagccagtctgatgcattaaataccaattttattatgtatattactgtttctgcttcaaatattgcttcgtataagtacagaccgcaaagcacttcccgcacagatccgtatcaatcccagtactctttcgcataatttcccgctgcttcttataacatgcagaaacagatacgatatcttcgcgtggcatacccgaacgccacaatgtatttttcagtgcatgtgccgggcaataccggacgcaggcatgacaggcaccgcactgagagcgtgtaaccggagcatcgcaggtcagcggggcatcggtcagaagagaagaaatccttacagcagagccatattgtggtgttacaagcagacagtttttgccgatccagccgaggccggctctggtggcaacagttttgtgaggtaaaggactgcggttgtccgagtctactgttatccggtctgttgtctgggcataagcctggtatcctctgcctgtcagatatttttcaccggcagttacaatggcattcagtttgtcgttcaaagtagtatacagtttgtagtattctctggttggagcaagttgaagatctttgatgacatgtttcggcaagggaattgcgactgcaattccaaccggatagtcagaagatggaactgcggtcagatccccaattccgaccaaagcagcaccctgtgagatcatataatctctgaattcttttgtgggattcataaaaatccctcctttcagaacatttccgttcattgacttattgtacattcaattttacaatagaatgcagaagaaagatagtgggaagggaaactattatggaaagtagaatgatggaattaatggaagcgattcaggaaagtgaaggacaggcagaacgcagggtgcttactttgctgggcggcagatacatttctgaaaaggcactggtcatagatggaaaaattgtctgggaaagcaggaaaaatggttattttcatggatatacagatgagataaagaatattacagaaagtggaatcacctatattggaaatgagaaagtattctgcgatacattgggacaggaaaaacagattgtgatctgtggtgccggtcatgtgtcgattccggtgattaaaatggcagtgatgatggactgtgaggtaattgtactggaagatcgtccgatgtatgcggatcatgcaagaatggccggggcgtcacaggttatctgtgaaccattcgaagaagcactggacaagatacagggaagtgcggatacgtattttgtgatcctgacgagaggacaccggtatgaccagatctgtctggagaaaatagctgcaaaagagcatgcctatatcggtatgatcggaagccgcagaagaacagcactggtaaaacaaagtctggcggaaaaaggcgtggatcaggaggtgctggatgcagtgtatacaccgatcggtctggatatcggagcgcagacaccggcagagatcggagtggcaattattgcagagattattgaagtaaagaacaggaagaaacggacttatggatattccaaagaaattatgcgtgcgctgactgctcaggaaccgtatccggaaaagaagataatggcaacgatcattaccagacatggttccgcaccacaggggttgggaaccaaaatgctgatatacagagatggccgctgcgttgggacgatcggcggtggatgtatggaagcaagagtcatccagattgccagacttatggcagcaggagagggagaacaggcaaggatctgccatgtagacatgaccggaaatgaagccgaagaagaaggtatggtctgtggcggggaagtggatgtatttctggaaatcgtctaagcgcggaaaacagaatcatcggaggcattaaaaagatgatagaagtagaggttaaaatacccattgaaaatatagaaaagataaagcaaaaattgcttgaaacagggttcatatatcagaaaaccgttgtggagacggatacttattttaccagtgatcactatgatatgcggaagaaggacaaggcactgcgcatccgtaagacggagaatctggatacgggagaagtaaaagcacagcttaactgcaaaggaccgaaattagaccaggtatccatgaccaggaaagaaacagagattgatatctatgagccggaaaagatggaagacattcttaaagaacttgaattttatccagcgtcttgcagagtgaagaagacaagatgttattatataaaagatcatatgacagcggctgcagataaggtagagaatctgggcaactttctggaattggagataattgttgcaaaagaagaagaacgagcaggtggattggatatgatatatgaactaatgagaatgttgggatgcgaaaagacagagacagtaagggattcatatctgtcaatgttagaaaaacgaggtgtctaacatcagaaagagccataagggacagataaagagccaaaattccccgtccccgtggttagctgttgacaaaaattatcgataagcctatactaaccttacgagttgagaaatattatcagtaacagtggaaataataccactgcctgtagataaatttggaaggaagtacagacgatgacattaaaagaattaccgatcggcaaaagtgcaaccttgacagttgtaggtggagaaggtgcattgagacagcattttctggatatgggacttattccgggggcagacgttaccatggtaaaatacgcaccaatgggtgatccggtggaacttcgtatccatagttatgaactgacactcaggcttgcagatgcggaaaagatagagattacagatgtccgtgatgagattaagattaagaatcagattccgaaagagaagattgatcatccgggacttggagaaggtggaaaatatcatgaaaaagcagatgaaaatccactgccggatggaacaacactgacatttgcactggcaggaaatcagaattgcggaaagacgacactgttcaaccagctgaccggctctaatcagcatgtgggaaatttcccgggagtgacagttgaccgtaaagatggagtgatcaaggaacacagtgataccctggtgacagatctgccgggaatctactctatgtcgccgtattccagtgaagagatcgtgaccaggaactttgtgttaaatgagcatccaaagggaatcatcaatatcgtggatgcaaccaatattgagcggaacctgtatctgaccatgcagctgatggagctggatattcctatggttctggcactgaatatgatggatgaggtgcgggacaacggcggttcgatcctggtaaatgagatggagcaggaacttggaataccggttattccaatctcggctgcgaagaatgaaggaattggcgaactgattgagcatgccgtgcatgtggcaaaatatcaggaaagtccggggagacaggatttctgtgatgcagatgaccatggcggggcagtacacagatgcctgcacgggatcatgcatctgatcgaggatcatgcgaagaaggcagacattccggtaagatttgcggcatgcaaactggcagaaggggatgaactgatcctggaacagctcaagctggatgagaatgaaaaacagctcctggagcatattgtaaagcagatggaacaggaacgtggacttgatcggtccgcagcaattgcagatatgcgttttacatttattgagaagatctgtgatgctacggttgtgaagccgaaagaaagcaaggaacatctgcgaagtgcgaagatggataagatcctgacgggaaaatatacagctattccatgctttgttgcaattatggcggctgtattctggctgacatttaatgtgatcggagctgcgttgtcgaatctgctggatatgggaatctctgcacttacgaatctggtagatggtgcgttgacatcctggaatgtcaattccgttattcattcgctggtaatcgatggaatctttaatggtgtgggaagtgtgttaagtttccttccggttatcgttaccttattctttttcctgtccattctggaagacagcggatatatggcaagagttgcatttgtgatggataaattactccgtaagatcggactttccggacggagtatcgtaccgatgctggtaggattcggatgtacggttcccggtgttatggcgagcaggacactgccttcggagagagaccgtaagatgacgatccttctgacaccatttatgagctgctcggcgaaactcccgatttatgcattttttacggcagcatttttcccaaaacaaggagcagtagtgatggtagcgttatattttggtggaatactgatgggaattctgatggcgctgcttttaagaggaacgatgttcaaaggtgaggccgtaccgtttgtcatggaacttccgaattaccgtatgccgggagcaaagaatgtagggcagcttctgtgggaaaaagcaaaggactttttgcagagagcatttaccgtaatcttctttgcaacaattatcatctggttcctgcagacatttaacttacacatgaatgtggtagcagattccaaggacagtatcctggcagttgtggcaggaatcattgcaccggtattccttccgcttggtttcggaaactggaagatttctactgcactgatcacaggatttatggcaaaggaaagtgtggtatctacgctttcggtactctttggaagtacggcagaactgacgggagcaattacaccggtggcagccgcaagccttttggtcttctgcctgttgtatacaccatgtgttgcggcaattgcatcgatcaagagagaacttggcgcaaaatgggcggcatatgtggtgctgggacagtgtgtggttgcgtggatcgcagcatttatcgtgcatctgattggtacgttggtgatgtaaagagtcataaaaaactcctgtggatggaattagatatgttccattcacaggagttttttgctgcatatattaaattacatgctctgcttttgctatttgttcttttatcttatatcttccgctgcgccggagacttgcgaataaagagcccgaaatattgtgccatatactgaagatcgccccaggcagtgtggcaaatgggtttgcggcaaagtttgcggtggcaagtgtgatagcaagaccgctgttctgcataccgacttcgatcgcaagggcggttgctttgtcatattccacatggaagatgcgtccggcaagtaatccaagtcccatacctgcaagattatgtaagataacgatacagagtacgaggaatccggatgtcatgatcttttccgcatttactgcgacgattccgctgatgatcatgacgatggatacaacggagatcagtggaaggatgccggataatttctcaatatgtctgccgatcagtttgcggagaaggatacccagaagaaccgggatcagtacgacctttacaaccgagattaccatccccgggaaagatacctgaacccatgcaccggcaagtaaatataccagaagaggtgtcataaccggtgctgccagagttgaagtgatcgtcataccgacagaaagtgcaacatcaccacctgcgatataagtgatcacattgctggcagttccaccagggcagcatccgaccaggatgacaccaagtgcgatatccgttggcagatgaaggaggaccgagagtccccatgcgatcagcggcataatcgtgtattgtgcggcaaatccgataatgatctctttgggtctggtaaataccactttaaaatctccgatatgaatcgtcagtcccatgccgaacatggcaacgccgagaaagatcgaagtatagtttgtagtccatgcaaatccatcacgccagaagaaggcaatgacagaaaagcagataatgatcattccaatatatttggtaagaacagagctgatccgtgataatacctttgttatctgctccatatattatacctcgtaactgaaattgtcgatgagtcgggtctttccgatataaactgccatagcaaccaggacgtcagcatttacagagtcaacaggctgcatgctgagtgcatcgaccatggatacgtaatcgatatgtgccagcggttcaccgtttatgatctcacacatcggttctaatacttcagatgcggcaataccatttcggatcagttcctgacctttctttacagcttttgaaaggcagagggcagctttgcgttcttcgcagcttaagtatgtattacgggaagatttggcaagtccgtcttcttcacgtacgatcgggcatccgacaatctggatatcaaagttcagatccagaaccattttgcggatgatagcaagctgctgtgcatctttctgtccaaagtaagcacggtttggttttacgatgttaaataactttgatacaacggtacacacccctttgaaatggatcggacgcgtcttaccgcacagcgtatcagataaagtatcgatactgacaaatgcgtgtggatcatgatacatttccgccggtgacggacagaagatcagatctgctccgatgctttcacaaagtgcactgtcgcggtcaaagtctcttggataagcttccagatcttcattcggtccaaactgtgtcggattgacgaaatcagatacaacaacgatatcattttcctcgcggcagcgacggatcagactggcatgtccctcatggagatatcccatagtagggacaagaccgatggtcttaccttctttcttccagttatttacgagttctcttgttttttcaattgtgttagttacctgcattggtattctcctttattcgttataattcggagagttctcttctgaatacactgtgatctctggtgattgcatgtaataaaatatgttgtgataattgagtatctttttattccatgtcttttaacagtccgtgacgttcataattggtcacgcggtttaccttgttctcctcatctacgaatacaaccgcaggtttgtgttcttttgcttcatccggcgtatactgtccgtaagccatgatgatgatcttatctccggtactgacacatcttgcagcagctccgtttaagcagatcattccactgccacgctgtccgctgatggtgtacgtttcgaaacggcttccgttgtttacatcaacgatctggactttctcatattcgagaattccagcagcctccagtaatgcttcatccaccgtaatgcttcctacataatcaagttctgcctgaacgacagtagcgcggtggatctttccttttaataattcaagtgtcatctcatatatcctttccttttaaggaaaaaaattcagccagaatacatctggtcctgagtcttatttcctgaaaatataagctcatttttgttgaaaattatgagattccagtgcttcagttctgagtatggttctgtcagggacagataccgtctccgctgttcattataaaaaggcagaaaaggtatgtcaatctatgtatacgaaaaaaaaacagaaccggatttctgaaattataaatccggttctgtattatttcttattatctttttttcttttcctttgcaaggagtgcggcaccaagtgcacctgcatatcttccatgttcggtaggagatacggtctgtccgagtttctgtgagagaatcttcgtgaagtaggtgctgttactgagtccgccagtcaggattactttatccggcaggtttttcttcatggcaagttgtgctaccttgttggcaacagaatcgacaacaccggcggcaatatcttcccgtttctgtccctcaccgatatagttgatgacctcagattcggcaaataccgtacacagggaactgatcggaagaacagttcctttatctgccatatcaaacagttcctgcagggtaacgcctaagcggtttgccataatctccagaaattttccggttccggcagaacacttatcattcatctggaagtcctgtaccatgccgccggacaccaggatgatcttggtatcctgtccgccgacatcgataatggcacattcatctccggccatctcccggccgcctcttgcatggcaggtaatctccgtgataacatgatctgcaaaatctacagcaacacggccatatccggttgcgaccacttttgaatcgtccgacagtacatctacactgtcttccagtagacgatccttgatcgtctggcaggtttccttgctgctccatccggttggcagtacaaaatgtatatcatgatctccttttacaacgactttggatgccgtagatccgatatcaattccaatataatccataataaaatttcctcgtttcacatatattttttaacaatatttatcccgcttcgggttgatatcccgttcaatggcggcaatttttaatatttcgatctgattctcgtcgatgcatttctggatcgtatccaggtcttcttctctaacgagcagtgagatgccgcagcatttactggccacgcgcggtgtaggagcgatagtggtcttgattccggcttcttttaatatcccatacagacgcattccgttgtcatggttgggaaataatacataatgctgtatcttttgcatgatctgttacctcggttatgtatcggacatgaattgtctgatattatttgttatctaacatttcgataaatgcactgattctggtacgaagttgtcctgcatcgctgtcggtgtaatcggtctcgattccaaggacagggattccggattttttcagtgctttctctacgaaatagccttcggtatcataaaggttacagaacttgaggttcacatcgatgataccgtcaactttgtattccttagcaagacgtaagatgtcatcaatacggccttcatttggtgtaaagcatgcgcagttgatcttcatgtatctttcagccagagccatatactggtcttccagtgttgtcttgctttcatcgacaagattttcaaaatatctggttccggtacacatctcttcacagacgattgcagcaccactggtctctacaatattatgaagcttccagttcggaattgcaagaggagttccggtcagcatgatacgtttggttccggcaggaacaacgcttacaccgtcttttactctctgatccagttcgtcacataacttattcgtcatctgtgtaaatcttgcaggatcatcatagaatgcaatctgagagatcagaagtacatcacatccgctgattggaagattctcattcttacgaagattgtaaagacgctccagagcttttcgtttattgttaattaatttaatactttcggccagtttttcggcagtgactacatttcctgtaaattcttctacgacatttttaaatgtctcaatttcttctgcccatgccttgatgtctttggcacgtttcatttgaggaaggtccatcacatgtaacggtacgtctttggcaagaatctcccatgctttcttcttgccgtcgcaggtggtctccccgatgaacatatctgcgatacggaagaatggacaggtgcggtcaagacgtgcaccaacagatgccttgatcagtggacaggtattggcaggaaggactttctctccgccaggaacccagaactgggaaccgccgcataatccggttgcaatcgcatctgccgcaaatacgatctcgtccggtacatatacacagaatgtgccgaagactttgccgccttttttctgatgctcgatcagttctgcagggcggataccgtgaatatctgcaactaccatattataatagtccatagaatccggacggttttcctgcgataaaaatacatctccaaatgcctgtggaagtactgcacagagctggtcatgcagttctacatccattccgagttcttcccacattttacgataatcagccattttaaaatacctccttatagtgtaattgatccaattgtatcgataagttaaacgtaacacttttagggggcccaggcaatgcataccggaagaattggctatagataatttacaagttcaatagaatatatctatagattctatactgagaacagttctcgaaatccagcgatgcactggtcgatttcttcgatggtattaaagtggctgaaagcaaaacgtatcgttccctgaggcattgtatgcagggtctgatgcgccatcggggcacagtggagtccgacccttgtcataattccataatcctgttccagagcaaatgcaatctctgcattgtcatagtccgggaaatcaagagagacgacagcaagccggtcctgaagggtctgccttcccacaatatgtgcctgtggaatttcacgtattttttcaagaaaatgtccggtcagtgccattttcttctgatggattgcggaaatcccggtttcgtccagataagtgagggcagcgtgaagtccgatgatgccagggagatttaatgtgccgctttcatacttgtccgggagatagtccggcataagaagcgaatccgactggcttccggtcccgcctgcaatcagaggtgtcagttcctgatccagagcttctgagatcagaaagccgccgataccctgcgggccaagcagtcccttatgtccggtaaatgcaagaaagtcgatgttatatttctgcatatcgatatcgacagaaccggcactctgtgcagtgtccacggcaaagaacagatgacggcgcctgcatatctcaccaatctcacggattggcagaatggttccgcatacattggaagcgtggagcatgatgactgcttttgtctccggacggatcagagcttcgatcgattccggatgcgttgtgccgtctgtctctgcaggaatcatcgtataatggatatcctgtgaagcaagctgacagagcggacgcatcacggcattgtgttccagactgctgaccagcacgtggtcgccgggctttaaaaatcctttgagcagacaattcagagaataggtgatccccggtgtaaatacgacacatctggaatccggtgcatgaaaaaatctggcgagctgcatgcgggtcttaagtacctgattttcaagttcgtaggcaccttcgtaatttccccggttaatattgaaggcaccggattctaaaagtttcgtcatggaagcagcgactcccggtgctttcggccaggatgtgctgccgttgtcaaaatatatgttctgttccatagaaaaacctccatgataaatatggtatctgatacgtatattgtaacagatttccatattaacgtatacaggagatgaagtcaggaaaaggatagaaaatgcgaataatattcatagacgatattaatagaatggaacgatttatcaatatttcctattatgtaaatacaggtacaggtggtatgatagtcttatgaaaaaaattatcaaaaaaattatcaaaaaataaaaaaagcacggaggaaatttattatggagttaattaaagaactgccggaggtattcgaagaatttgcagaacagcgtcagaaatcattcctggcaatgaaggggttaaaagaccagggagttccggttgttggcgcatattgtacttattttccggcagagatcgcaagagcaatgggagcagttacagtcggcttatgctctgtatccgatgagacaatcccggacgcagagaaagacctgccaaagaacttatgtccactgatcaaatccagctatggatttgccaagacagacaaatgtccattcttctacttctcagatgtagttgttggggagactacctgtgacggaaagaagaaaatgtacgagtatatgtcagatttcaaagatgtattcgtaatggaactgccaaatacacagagcgagatggccctgaaactctggaagagtgaactgattcgtttcaaagaatatctggagaaaaaattcgacgtagagatcacagatgaagctgtattagaggccgtaaaagaagaaaataaagtaagaaaagtcatgaaagacctgtatcatgtcatggcacttgatcctgcaccgatcaaaggcggcgacctgttcaaagtattatacggaagcggcttcaaattcgatcgtaaagcaatcccggcagagattgaagccatgagagagaagattgaaaaagaatacgaagaaggtaagagactggacaagatgcctcgtatcctgatcaccggatgtccgatcggcggagcaactgagaaagtgatccgcgccgtagaagacaatggtggagttgtagttgcattcgaaaactgtaacggagcaaaatcttttgacaaattagtagacgaagagaatccggatgtatacgatgcactggcaagacgttacctgaacattggctgttctgtaatgacaccgaatccaaacagactggaccttctggatcgcctgatcgatgaatttaaggtagacggagttgtcgagatgacacttcaggcttgtcatacatataatgtagagtcactggctatccgtaaatttgtgaatgagaagaagggtattccgtacattaatgtagagacggattattcgcaggctgatatcgggcagttgaatactcgaattgcggcatttatagagatgctgtaaatttctatttaattaattatcgcggcctctcagtccatgagaaaaacttggtgctctatttactactaagattccgtgatgtaagaaaatctaaggatgtccaaatctcctaaaagcaaaggcattccactcataactcgcttcgctcaaacaattcgttccatgcctttaacggagatttgaacaccctaagtttttctaaacatcactccatatacgcgacaaacagagcaccaagtctttctcatggactgagaggccaatgataatgaattcaatagagggttgtaacctttgtgtgcagccggaaagttgaggtggaagccttgagtttccggattttttgtacactttcggtatcacgccggttacgcttcgactattgaatcattacagtatgcgataacgtaacgtgaaaaatgggaagaaaacccggtaaacgtccagtatgatgagaatggaaataagaaagaaaaatattactgtctggatatgttcccatatccgtcaggaaacggacttcacgtaggtcactggagaggatatgtaatctctgatgtatggagccgttataaattacagcagggctattacatcattcatccaatgggatgggatgcattcggacttccggctgagaattacgcaattaagatgggcgttcatccggagatctccacagctgccaacattaagaatatcaaacgtcagatcaatgagatcgcggctctttatgactgggacagagaagtaaatacaacagatccgaatttctacaaatggacacagtggatctttgttaagatgtttaaagaaggtcttgcttatgagaaagaattcccgatcaactggtgcccttcatgtaagacaggtcttgcaaacgaagaagtagtcggtggaaaatgcgaacgttgcggagcagaggtcacaaagaagaacttacgtcagtggatgttaaagatcacaaaatatgcagacagactgttaaatgacctggataaactggactggcctgaaaaggttaaaaagatgcaggctgactggatcggtaaatcttacggagcagaggttgatttccctgtagaaggaagagacgagaagatcacagtttacacaacaagaccagataccttatacggagcaacattcatggttctggcaccagagcatgaactggctaagagtcttgcaaacgatgagacaagagaagcagtagagcagtacatttacgatgcttctatgaagtctaacgtagaccgtatgcaggataaagaaaagacaggtgtcttcacaggaagctatgcgatcaatccgatcaacggagcaaaagttccgatctggctgtctgattatgtactggctgactatggtacaggagcaatcatgtgtgtaccggctcacgatgatcgtgactttgaattcgctacaaagttcaatatcccgatcatccaggtaattgcaaaagacggtaaagagattgagaacatgacagaggcttatacagatgctgtcggaaccatgatcaattccggagaatggaacggacaggaatcttctgtactgaagaaagaagcaccacatatcatcgaagagcgtggaatcggacgtgcgacagtgaacttcaaactgcgtgactgggtattctctcgtcagagatactggggagagccaatcccgatcgtacattgtccaaaatgtggaaatgtaccggtaccggaagaagaacttccactccgcctgcctgaagtagaatcttacgagcctacaggaacaggagaatctccactggctgcaattgatgagtgggtaaactgcaagtgccctcagtgcggagctgatgcaaagagagagacaaacacaatgccacagtgggctggatcttcatggtacttcctgcgttacgtagataaccacaatgataaagaactcgtatcaagagaaaaagcagatgagatgcttccggtagatatgtatatcggaggagtagaacatgcagtacttcaccttctgtattcacgtttctacaccaagttcttatatgatatcggagtcgtagactttgacgagccattccataaactgttcaaccagggaatgatcactggtaagaacggtattaagatgagtaagtcaaaaggaaacgttgtatcaccggatgatctggtaagagactatggatgtgactccctgagaatgtatgaactcttcgttggaccaccggagttagatgctgagtgggatgacagaggaatcgacggagtaaaccgtttcctgaaacgtgtatggaaccttgttatggacagcaaggacgcagacatcacagcaacaaaagagatgatcaaagagcgtcacaaactggtatacgatgtaacaacacgtctggaaagcttcagcctgaatacagtaatctcagcattcatggagcacaacaacaaactgcttgagatcgctaagaaagagggcggaatcgacaaagagacattatctacaatggcagtacttctgtcaccattcgcaccacacgttgcagaagaactgtgggaagaactgggacacacagagagcgtattcaaagccggatggccaaaatacgacgagaacgctatgaaagatgatgagatcaaagttccggtacagatcaacggaaagacaaaagcagttatcgagatctctgcagacgcttccaaagaagaagcacttgcagcaggtaaagaagcaattgccgacaagctgacgggaaatgtgatcaaagagatctatgttccgaagaagatcattaatattgtaatgaaataagaaattcatatagaattataatgaatggggaaagagggttgcctgaaagagagcgggtgatcctcttcttttttatagtcaatataagttataatttattgcaattatatatactgctgtgttaaaatacaacaaagcatatttcaaaattgtcaaaggtgtgtgtcaccgtctatagtctgattacatttcggaaatctatgcttttataccaggaaaaaaggaaaaaaagcaggggtccgagcaaaacaatcagattccgtaatacagatataaggacagtatttgagataatccagatgatttatgaacgggattataaaaagacgaatgcattcattgtatggagaaaaagaattgatactgaattagcactcgttgaatatgtgtaaggcattggaagaactatccgttatttgaaagataatagaagatttacaaggagaagtataaaatgaatattacagtatatctcggagcaaatgaaggaaatgacccattttttaaagaagcagtgcgtgagttaggagcgtggattggaacaaatggaaatactcttgtatatggcggttcaaaatccggcctgatgggagaacttgcagaaagtgtattgcaggccggtggtaaagtaatcggtgtagagccacagttttttattgatgcaggatttgtatatgacgagattacggaactgatcacgacgaaagatatgtcagaaagaaaggcaaagatgatagaacttggagacgcgttcattgcatttccgggaggaacgggaacactggaagagatcacggaggtgatgtccaaggtatcgctaaagcatttggatgcaccgtgtattctatataatctgaacggatattatgacagcctgaagcagcttctggagcatatgatagagatggatctttcatccagagaaaagcaggaaggaatatattttgcagagaatctggaaaaaattcagaagtgtctggctaaatagaggggatgtcatgaaagaaaataagaacaggatgattgaccgtcaaatcagaaaaatgataagataaaaaaggtacaaaatgagagaccaatgaggaaagaaatgaacttcgatcagatgaaattaaagcttctgggagaggttacattgaattatggtaagtttatatctacggttattaattttctgaacacatacaaaggttacaattccgctgttgaatttagtatcattggctaatcatgatatgagaaagacttggtgttatgtttgtggtgtatatggagggatgtttagaaaaactaacggagatttggactcccttagattttcttacatcacggaatcttagccgcaaacataacaccaagtctttctcatggactgagaggccacgatgataaattaaataccaattgattgagtgaaaagccgcgacttttctaatcgtttataaaattcagaataaaaatccccatcttccggataaggcgtaagataaaactgtgtcagcacatgcatactgatcgttctggcggttccgtcagaattcgcagaagaatcgaaagcaagattcataacatattcctgaaggtctttcagaaagaaatgccagtcggctatatatttttcataagttttcagattcggtgtatccagccatttcttgatttttactttggaacgatctgtttttggacattcatgtatctgtaagaaatactggaaagaccgattttcataaaagcgtccaagaggaaacatacggcagattccgggacggaatgcatggaccgtacagcgtccattagtatccagaaaggaacaggcttcttcggctctggccattttcagattcggaagaatgataccgtctacaacattaagttccagagggccggtcagcagttcgtttacagatttggaaagattggtggaaagccggtatacatccagtggatcaaggacgatggaatttcccatgccatgacaacaggcagagcagccatcacatcctttacagtctgtcttggccatgtcattgctgctatataatcttccatcggatatttcatccaaattaatttctcttaacatatttattacctcatatctgtgtttatcgttttcttgtatagacttgttagataagttgattatagtgtaaaatagagaaagatgcaaataaaatagaagggatgaggaaaggtatgaaattttttcatttatcggatctgcatattggaaagcagcttcatcgttataatttaaaagaagatcagcaggtgatattaaaagaagttattacttatgcaaaagaattacggccggatgcaattgtaatcgccggagatatttatgataagtccgttccatcggcagaagctgtgaatgtatttgatgagtttctgacagatctttcagagattacaccagagattccgattctgattatcagtggaaaccacgattcgccggatcgtctgaagtatgcatctgagattttaaagagacatcatatttaccttgccggcaatgttcctgaaagaccggaagaacatattgaaaaagtaactttgcatgatgcatatggagaggtggatttttatctgcttccatttatgaagccggcatatgtgaaaaatatttttgttgacggaacaccagaaacgtattcagatgctgtaaaagaaattattaaacgggaaaagatagattataaagataaaagaaatgtattagtttcgcatcaattctatgtgggcgaaaaagcggaaagcccggaaacctgtgattcggaagtgttttctgtaggtgggattgataacgtagatattggatcggtgaaagaatttgattatgtagcgctgggtcatcttcacggtgcacagtgtatcggaaaaccggagatccgctattgtggaacgcttttaaagtattcggtcagcgagagtacacagaataaaagtcttaccgtggtgacattaaaggcaaaaggcgagaagccggaaattgaaaattacccgctgcatccgttaagagatgtcagaaagaaaaaaggaacactggatgagattataaaagaagcccaagagacggaaaaagatgattatatcagtattacactgacagatgaaatcgatccgtataagccgaaagagcagctggaacggatattttcccatatactggagatccgggtggataatcagcggacaagaacaaaattaaaagaaatggatgaagaactggtcatgaaagatccttttacttcttttgcggaattctataaggagatgcagggaagagagatgaatggggaagaagagacgatcatgaaagaaatcttcgataaggcgaagggagttgagtagatgagaccggtaaagctaattatgtcggcatttggatcatatgccggtaaaacagagattgattttacggagatcccgaatggtctgtttctgattacaggagatacaggtgcgggtaagacgacggtctttgatgcgattacttatgcattgtatgacaggaccagcggaggaaccagagatggaaatatgatgcgaagccagtatgctggagaagaaacgagtacttatgtagagtacacttttttgtatcaaaagaaagaatacaagatacgaagaaacccggaatatctacgacttgggaaaagaagatatgcagacgggtcgccgagatatgtgaaagaaactccgaaggtagaactgacattgccggacggcagcatattcaaaggaaagaaaagagagacagatcagaagatttccgagattatcggactggatgcagaccagtttacgcagatttccatgattgcacagggagaatttctcaagcttttgctggctgagtccagggaacggaaaaagatattttccagaatatttcagacgcggttttactacaggatacaggaagaactgaaaaaacaggctgtacagttatatgtgaagctggaacaaaatcttcaggaaatgaaacttgagatggccagagtggaatatccgtcatataagaaggatggaggtgtgtggccggaagaagttcagctggaaaaatgtacagaagaaaatgaacttataaagcagtggaaggtgattgccgggcaggatattccggacagagaacgtatatccgtgattttgaaagagatcattgatcagggaaaccggtgggaaaaagtatgcaaaaaagaatcttcccgggcgcagatggtactggaagataagaaccgactgctgaaggaagcagaactgctgaatcagctctttgattcgtatgaacgggtattgagccgactggaagaaaaaatgccggaaaaagcgaaatatgagtttttaacaggacggatacaaacaggtaaaaaggcgggacgtgtactgcaagaagaaaaaaggtatctggaggaagaaaagcgcctgacaaaactggaagtacaggaacgtagtcttcaaaaggaattacaggaatgccggaagcagctgcaggaattaacagacaaacagaaagaagctggccgggaaaagacggaaaaagagacagtacttacagaaaaaaaggtgcggatacaggatgcaattttacagtatcaaagtatgaatgcaaaaaaagaagaattagataaaattacaaaagaaataaaaaactatcttaatcaatcggaaaccatactacagaagaaagaaatcctgcaaaacaatcgaaaagaaatattaacatttctaaagaaatatgaaaagatagaaacatgcataaatgaatgcaggaatcaaaaagaacatatagaagaacagatacgccattacgaagagcttgaccatcaggaagagagaaaagaagaattaaaagaagactgcgaaagagcaaagaaggaagcagacagggagcagaagaattatgaaaatgcctgggcggaatatgaaatgaagtatcacaagttcctgaatgaacaggcggggatacttgctttgaatctggaagatgggcagccttgtccggtctgtggttccagagaacatccacagattgcagccttgagtgatgaggcgccgacgcaggcggaagtggaacttgcaaaagctgaaagggataagaaagaaaaaataagagatataaaaacagaagcattcaggaaatgtcttgcgggatatcaggcagcacaggaaatctgtctgacacttcgaaagaatataaaagatgaggtggaagatataactggaattggctggaaagagaagatacaaagcctgaagcgtacgcttatggaaacggaaaaaagattgaaacagctggaagaaatttttgaaagatgtagaacgttaaaagagaatcaggaacagattgcgaaccagatagaaaaattggaagaaaaagaacgaaagaccagccagagtctgacggaatcaaaacttatgtatacaaagctggaggcggagtatcaggcaatggaggagaagcttccatacaagacgatggaagaagccgaagaacatctgagagagataacaggaaaacttgagttggtcagaaataattacgagacggtaacaagatgtcttacggaaaagcagaataaagaaaaggaactggaaggacaacagaagaccgtatcagcatctgtcgtgcaatcacaggaagaagtacagaaaaagatacgttcctataaacagattataaaagagcagggatttgaggacgaagaaagctaccatagtcaatgtatgactgagagagaactggaagaagcagaacaatggatagaggcatatcagaaagaattgcaggaactggaagcgaacaggacattgcttgagcaacagttagagggaaaagaaagaaaagatacggaacagattgcgcgggagataaaagaggcatccggagagctggaagaaatccgtaaggaatatatgaaacttcataataccaatgaaagaaaccgtgagataagagacaatctgaaacgtaattttgaaaagaacagtggacttcagaagcagtatgagattgttggaaatctgagtaagacagcaaatgggaatctgagcggaagtgccaagcttgattttgagacctatattcagaggcagtatttccgtcagatcatacgtgctgcgaataagagactggttcgtatgacgtcaggagagtttattctgcaatgcagagatgtagaaaaactgggtagccagggacaggccggactggatctggatgtttatcatatggcaacagatacggtcagagatgtaaaaacattatcgggaggagagtctttcatggcagctttatccatggcacttggactttcagatattgtccagaatacagcaggtgcaatccatctcgatacaatgtttattgatgaaggattcgggtctttggatgatgtatcgagagatcaggcaatccgtgtgttgaatgatcttgcagataaggacagactgattggaattatttctcatgtaaatgaactgaaggagcagatagatcataaacttgtggtgaaaaagaacgaaaagggaagttctgtaagctggtctttataagagaaatataaggtataagatcagaaatacagagaagctgtcattttctctatagtatatgcagataaaaaaggaaatctgttgcaatatataaacatgcaacagatttcctttttatatcatattatttatggtcgttctgatatttcaaagcggcttcaataaatcctctgaacaatggatgcggtctgttcggtcttgattttaattccggatgagcctgagtggcaacaaaccaaggatgctcaggaatctcgatcatttccacgattcttccgtctggtgaaagtccggaaagcttcatgccgtgagaagttagtgcatcacgataatcgttatttacttcataacgatgacggtgacgttcgctgatctgctctgttccatacatttcgtaagcttttgatgtcttatcaagaacacaaggataagctcccagtcttaaagttccaccgatgtcttcgataccgatctgttccggcatgatatggataaccggatgtgtagtgttcggatcaagctcagcactgtgtgcatcgttatatccaagaacgtctcttgcaaattctacgatagaaagctgcattccgagacacagacctaagaaaggtacattgtgtgtacgggcatatttgattgcttcgagttttccgtcaattccacgtgtaccgaatcctcccggaaccagaataccacttacatcaccgagtaattcatctacattatcggcagtaacagtttcggaatcgatccatttgatatttacggttgcacggctgaagattccaccatgttttaaggcttctaccacgctgatgtaagcgtcatgaagttggatatatttaccaaccagagcaactgtgacttctgtgtttggattcttaaggtagtcaaccatctctgtccagtcttttaagtctggttccggacaatcaaggtgcagacattcacatacgacacctgcaaggttctctttttccattgcaagaggtgcttcgtagagatattctacatccaggttctgcagtacatggttagcaggtacattacagaataatgcaatcttgtccttgattccgacaccgagcggatattcagaacgacataccaggatatccggctggattcccattccctgaagatcttttacacttgcctgtgtaggtttggtcttcatttcctgagaagctttcagatatggaatcagtgtaacatggatcaggataacattttcatgtcctttttcatgctggaactgacgaatggcttccaggaaaggctggctttcgatgtcaccaacagttccaccgacttcaataatggcaatttccgtattctcagcagcagggttgcggtagaagcgggatttgatctcgtttgtaatatgtgggataacctgaaccgttcctccgccgaaatctccgcggcgttctttctgaagaacagaccagtagattttaccggttgttacatttgaattcttgctcagactttcatcgatgaatctttcataatgtccaaggtcaaggtcggtctcagcaccatcatcagttacaaatacttcaccatgctgtacagggttcatagtaccagggtcaatgttgatatacgggtcaaatttctgcattgtgactgtgtaaccacgggctttcaacagacgtccgagggacgcagccgtaattcctttacctaatccggatactacaccgcctgtaacgaatacgtattttactgccataacttcctccttaagtcaaaaatagtttctctgttataaagtgttcaaaaaaatactttaagattatacacctttgttattaaaaaatacagagtttttttcatattttgcttcaaaagttgcctgaatagacagacgcttgaactgtttgatgtctacagaccccggcatgacagatacatgaacctgacagccttttaattttggaagctgatccattgcaagtctggcgtctttgctggttgcggcacttacggagagtgcaatgaggacttcatcggtatgcagacgtggattacggctgcccagatacttggtcttcagactttggattggttcgatcgcctgtggtgagatgatcttaatctcgtgttcaatacctgcaagttcttttaatgcatttaacagcagggcagagcatgcaccgagaagatcggatgtctttccagtgacgattgatccatccgggagttccagtgctgccgcaggtccgttggtccgttcggcttctgtcaatgctgcatcgacgaccggtctgtcatgaaccgtaatatttgcctgattcattaacatttctaatttataagtctcttcttcagagcatgcaccaagcaagagtcttcttctggatgcatagtatctgcggataatctcctgacgggaagcttcctgacatgcatcgtcgtcgcagatacagtttccggccatattcactcccatatcggttggagatttataaggactttcaccgtagatgcgctggaacattgcatttaatacagggaaaatctctacatcacgattatagttgatggttgtctcaccatatgcttcgagatggaacggatcaatcatattgatatcattcagatcagctgttgctgcctcgtaagcgaggttaaccggatgcttcaacgggatattccagattgggaatgtttcgaatttggcgtatccggctttgattccgtgtttgtgttcgtgatataactgggacaggcagactgccattttaccgcttccaggtcctggtgcagttacaacgaccagcggacggcttgtcttaatataatcattttttccatatccgtcgtcacttacaataaatggtacatttgtagggtagccagggatcaggtagtggcggtacactttgatacccagtttttccaggcggtttttgaataattcagcactttcctgagcgttatatttggtaataacaacgcttccgacataaagccccagtccctgataaatctgcatcaggcgaagtacatcggaatcataggtgataccaagatcaccgcggatcttgttcttttcaatgtcttcggcactgatgacgatgacgatctcggcctgatcagaaagttctcttaacatgcaaagcttgctgtctggctggaatccgggaagaactctggaagcatgataatcatcaaaaagtttaccaccaaattccagataaagtttgttgtcaaattgaccgatgcgttcacggatgtgttcggactgcatttttaaatatttttcgttatcgaatccaattttcataagtatatgccctcgtttaaaatttatttgatttttgatgcggtaaaactgctgtatgcagatctgccgtcatactttgtataaaaatgaaaagaaaaatgcgccggaagcggcataagcattttcatttcaagtatactacaacacataggaagtttacaatcttttcataatgtttttattgatttctaacatgacgctctatataataattaggtatacaggaggattaaaatggataaccagaataataagaataacaagaataataaacagggtatatcgtttattttactggtcacagttattacatcgatcctggtgatcgcactgttccagtttcagggaatgacctctgcaaaagagattacctataataaatttctgaaaatggtagatgacggagaggtcagaaaagtacagatccagagtgacaaaatcatgattgttacaaaaaaggacaaggacagcggggttgcacaggaatattacacaggagtggtgaatgacgatgacctgacaaagcgtctggagaaggcaggcgtggagtttaagcaggagattccggatactacatcggcagtagcgatgaacgtgatcttaacattcctgccaattgcattctttgtcggaatgatcatctggatgacaaagcgtatgtcaaagggcggcggcatgatgggaatcggtaagagcaatgccaagatgtatgtggaaaagcagaccggagttacatttaaagatgtagccggacaggatgaagcgaaagaatctttacaggaagtggtagattttctccataatccgggaaaatatacgagtgtcggtgcaaagcttccgaagggagcactgttggtcggccctccgggaacaggtaagacgcttttggcgaaagcagtagcaggagaagcaaaggtgccgttcttttcattgagtggttcggcatttgtggaaatgtatgtcggtgtcggagcatccagagtgcgtgatctgttcaagcaggcacagcagatggcaccatgtatcattttcatcgacgagattgatgcgatcggtaaaagccgagacaatcagatgggtggcaatgatgagcgtgagcagacactgaatcagctgcttgcagagatggatggatttgaaagcaataaaggactggtacttttggctgcaactaacagaccggagattttggatcctgcattattaagaccgggacgttttgacagacgtatcattgttgaaaaaccagatctgaaaggacgtgtagaagtcctgaaggttcattctaaagatgtgaagatggatgagacagtcaatctggaggaaatcgcacttgcgacatccggagcagtaggttctgatcttgcaaatatgatcaatgaagcggcaattaatgctgtaaagcatggaagaaatgcagtatgtcagtctgatttatttgaagcggtagaagtggtacttgtaggtaaggaaaagaaagaccgtatcatgagccaggaagaacgaaggattgtttcttaccatgaagtcggacatgcacttgtaagtgcattgcagaaagatgcggagccggtacagaagattacaatcgttccacgtacaatgggagcacttggttatgtaatgcagactccggaagaagaaaaattcctgaataccaaaaaagaacttcaggcaatgttagtcggactgcttgcaggacgtgcggcagaagaagtagtgtttgatacggttacaacaggagcctctaatgatattgagaaagcaacaagcgtagcaagagcgatgatcacacagtatggtatgagcgagaaattcggattgatcggtctggaatctattcagaaccgttatctggacggacgcccggtcagcaactgtggacagcagacagcatcagagattgacgaagaagttatgaagatgttgaaagatgcttacgaagaggcaaaacagcttctgagaaatcacagacaggcgctggataaaattgctgcattcctgattgaaaaagagacaattaccggaaaagaatttatggagattttccatgaagtagaaggaattgatccagatgcaccgaagaaggaagaagcaagaatcggtatgaatccggtagagggtgaaggatttgtgatgaagccggcagatgatatagatgatgcgcataacgcagatgtacaggaaaaatcagaaaagacagaagaaaaaactgtcggaacagcaactgaatctgttcatgaagaatagaattctataaaaaagaacaaaagatatgaagtatggcaagagccggcttcatatcttttttcttttcaattatatttgtctggtatataataggcaggataagattattctggaggagatataacatgaaaggaagattgttcggagtcggagttggtccaggtgatccggaacttatgacgtataaggctgttcgtacgatagaaaaatgtccggtaatagcagtgcctgcgaagggcagggaacatgcggtcagttacagaattgcggcaggaatggtagataatatggaagaaaaagaatatctggatctggatacgccgatgacaaaggacagacagattctgaatcagaattatgagaaagctgccaaaaggatcatagaggaactggaaaaggaaaaagatgtagcatatctgacattgggagatccaacgatttattcgacttatatgtatattcaacgtattataaaggaaaaaggatatgaaacatcaattataaacgggattccatcattttgcgcagctgcatcaaaactgaatgaaagtctggcagacagagcagatgagcttcatgtgattccatccagctatgatataaggaacgcattgagatatccgggaacgaaggtcctgatgaagtctgcttccagattagcggaggtaagggaaatcctggaagaaaaaaatgtggatgtaaagatgatagaaaattgtgggatggcagacgaacagatatatgaacggttggaagatataccagagcatgccagctattattcgcttctgattgtaaaagaatctgtgtaacattcataagcaacgggtaagaaaatagtaaaagaaaatgtacaggtgacatatatggaaaattttaatatacaggaagaactgaagaagctgccaggaaaaccaggtgtatatcttatgcacgatgaaaaagatgcgatcatttatgtcggaaaagcaatcagtcttaaaaaccgtgtccgacagtattttcagagcagcaggaataagggagccaagatagaacagatggtgacacatatttccaggttcgaatatattgtgacggattccgagctggaagcgcttgttctggaatgtaatctgattaaagaacacagaccaaaatacaatacgatgctgatggatgataaaacgtatccatttataaaagtaactgtaaatgaacctttcccgcgtgtaatgatggcaaggcggatgaagaaagataaggcaaaatattttggtccgtataccagtgccggtgcagtaaaagatactattgaactgatacgaaagctttatcatattcgaagctgcaatcgttcactcccaaaagatatcggaaaagaacgtccgtgtctcaattatcatatccatcagtgttatgcgccgtgtcagggctacatttccagagaagagtacaggaaatctattgatgaagtagtaagattcctgaatggaaattatgatccgatattaaaagaactggaagaaaagatgctggatgcatccgaaaatctggaattcgagaaagcaatagaatacagggaacttcttgcaagcgttcagaagatcgctcagaaacagaagattacagatacagcaggggacgacagggatattattgcaatggcttcggaaggtgaggacgcggttgtacaagtcttctttatccggggaggaaggttgatcggacgggatcatttttatctgaagattgcggaaaatgatacaaaaagcgaaatcctgtcaagctttatcaagcaattttatgcaggaacaccgtatatcccggccgagttaatgttgccggaagagattgaagaccaggagattatagaggagtggctgacgaccagaagggaacataaagtacggcttcgtataccgaagaaagggacaaaagaaaagctggtagagctggcgcagaagaatgcacagatggtattaaagaatgacaaagaacgtctgaagcgtgaagaaggaagaacgatcggagcggtgaaggaactggaaaaaatactgggacttaccggaattatacgtatggaggcttatgatatctctaatacaaacggatttgattcggttggttctatggtcgtttatgagcatggaaagccaaagcgtaatgattatcgcaaatttaagataaaaagtgtacagggaccggatgactacgcaagtatgaatgaggtgttgacccgaagattcgagcatggattaagggaacgacaggatgaaagtgagacaggcggatttcaggcattcccggatctgatcatgatggacggaggccggggacaggtgaatattgcattggaggtcctggagaagctgaatctgcacattcctgtgtgtggaatggtaaaagacgataatcacagaaccagaggattgtatttcaataatgtagaattaccgattgaccgtaattcggaatgttttcgcctgatcaccagaatacaggatgaggcgcatcggttcgcaatcacattccacagacagttaagaagtaaaggacaggtacattcgatactggatgatattccgggagtgggacctgcaagaagaaaagacctgatgcggagctttgaaaatattgaagcaatccggaatgcaacagtggatgatctgaaagagctgccgtccatgaatgaaaaatctgcgcaggaagtgtataaattttttcaccaggatacttaagtatggtataatatggctatcagatttttaatacgtgtgaggtaaaagaatatggcgaataaagtaaaattaaaaacactcgttgaaaaaatgaatctcaaaaatcttacaccggatgtagatctttccgaaaaagaagttgagataccagacattaacagaccggctttgcagcttaccggattctttgaacattttgattccgaacgtgtgcagatcataggatatgtggagtacacattcctggagaagatgacagatgaagttaagaaaaaaaagatttatgaaacactgctttcttacaagattccatgtctgatcttctgcagaaaccttccgccggaggcaatgcttcttgaaatggcagaaaaggctaatattccagtgttccagacagagaagaagacatcagaatttacagcagagattatccgctggctgaatgtagaacttgcgccatgcatttctatccatggtgtgctggttgatgtatatggtgtcggagtactgatcatgggagaaagcggaatcggtaaaagtgaggcggctctggagctgatcaaacgtggacaccgtcttgtcagtgatgatgtagttgaaatccgcagagtcagtgatgagacacttgtaggaacggcaccggatattacgagacattttatcgaactgcgaggtatcggtatcgtagacgtcaaggctctgtttggtgtattaagtgtcagagagacacagaatattgatcttgttatcactctggaagagtggaataagaataaagaatacgaccgtctcggtctcgaagaagaatatacagaattccttggtaacaaagtggtttgccatcatctgccaattcgtcctggacgtaatcttgcaatcattgttgagacggcagcagttaaccacagacagaaacagatgggatataatgcagctcaggaactgtacaaacgtgttcagcagaatttaataaagaaataggagaaatacagaaaatgaaatattgctttggagtagatatcgggggaacaactgtaaaattaggtttgtttacaaccgaaggagagattgtagataaatgggagattaagacacgcacagagaatcagggtgaagccgttcttccggatattgccgctgctttgaatgaaaagttagaggaaaagcagattccgaaagatgaagtggaaggaatcggagtcggagttcctgcaccggtagattcggaaggagttgttcagaatacagcgaaccttggctggggatataaagaagtaaaaagagagatggaagaactttccggtatgaaagcagagatagggaatgatgccaatgtagctgcacttggagagatgtggctgggtgcaggaaagggccgcaaaaatattattatggtcacacttggaaccggagtcggcggtggaattattattgatggtaaaccattggtaggagcacatggtgcaggtggtgagatcggacatctttgtgtgaattatgaagagacagatcactgcggctgcggcaacacaggatgcctggagcagtatgcatctgcaacaggtattacaagacttgccaatattcgtctggctaaggatgataaagcgtctgtattaagaggacaggaagtcagcgccaagaccgtatttgatgctgttaaggcagacgatgaagtggcaaaagagattgcagaggaatttggaaaatatcttggacatgcgatggctaatcttgcagctgttgcagatccttcagcaattgtaattggaggaggcgtttcgaaagcaggagaagtacttcttcagtatgttgaaaagaattttaaggaaaaagcattctttgcgaacaaagatacggaatttgttcttgctacactaggaaatgatgccggtatctgtggagctgcgaaactgattctttagagcttttagagagttatacatccttttggatgtcaggtataataaaaactgcggaaacattttgttcccgcagttttttattgtcatgcatttggaaggagcttccagtggcaggtcctgtagatacctttctgtagatatcataggcttgtacagtatggttactgagaagtatctccgccggtagagccacctgtattaccaccggtagaaccaccacctgtattaccaccggtagaaccaccacctgtattaccaccggtagaaccaccacctgtattaccgctggtagagccacctgtattaccgccggtagagccacctgtgttaccgccggtagaaccacctgtgttaccaccggtattatcactggtagtgcctgtattattgttataactgtttcctgtattgtttgaataagaagaagcatcttcagttgtatcattgtcttctgtagaagacttatactttcttccggaagagtatccgtgaccggaacatgtttcggatggaagcgtgtctttggcaaaatattctgtaatagaagggcatccgttggttgcaagctttccggtaatagtacatatactctttttctcaacagaggtcggaaccttaaaatctttactttccagattctcgtgaatacgactcataatacctttccagagtctgaagcggaaacttgtgtcataatcacattctttattgtcgtcataaccgccccatacagcacatgtataatatggtgtaaatccacagaaccataagtctttattggatgttgtggtacctgtctttccggctaccggcatattcggaagctggcatgctgtacctgttccggaattgacaacatcttccattgcactggtaagaagataagctgtgctgtctttgataactgtatgagattcgcctgttccgtcaagaagaacgttgccatcgtggtctacaactttactatataaagttggtttgttatagacgccgccgttagcgatagaggcataagcggcacacatttcatagttatagacaccttctgtgattccaccaagtgcgagcgtctgtgaagtgctgtcatcaaagaccttgccgttgattgttttgtcttttaccagagtactgataccgaatttttcacagtattcatagcctaattcctgagtgatttcatcgcttaactttacggcaactacgttgatggattttttgataccatttctgagcgttgttgtaccgccgtactgtttgttggcattccgcaaaacatttccattctttaaggtatatggttcatcatcaattgttgttgcgagtgtcttatcacaggaatctaatgccggtgcataagctgcaaggatcttaaaagtagaaccaggctgtctcttggaaccctgataagctctgttcagtccaagactggaagctttttctccacggccgccgaccattgctttgatctgtccggtcttctgatccatgattgtgatagaagactgtggctgaggggtaatggtaatacgttcatcataggtatcaccctcctgggcaatcgtggatttccattctgccaccattgcttttgcggcatcttcactggagtagagaagtccctgatcatttccgtaagttttttctacataatttttaatattattacttccatagttttcaaccgatccatcagcacgggttaccgtcagcgcataatcaagaccatactctttcagaccaggatagttggcatcattattagcttcttcatcacagattttctgcatttcctgattttgtgtagagtagatactgagaccgccgctgtaaacggcattgtaagcctgtgtatcagtgtagccaagctgatctttcagatcctggattacctgctgtgcaagtgcatcaacaaagtaactgtatgcattatcagcctgggaagaagcgctggttgcctggattcttgcatagacatcgtcggacatcgctttatcatactgcttctggctgatatagccttgctccagcatattctttaatactttattacgtctgatcttgttattctcgggacgtgtaactggatcataatctgtcggattctgtgtgattccggcaattaccgcacattcagataatgtcagatcggaaacatctttaccaaaataacgttgagaagcagactgtacacccagacaattctgtccaaggttgattgtgttgagataactttccataatctcatttttactcatctgcttttcaatctgtactgcaagatactgttcctgaattttacgttgtaatttatcatagaaatttttctcttttgtaaagttcgggaatacattgttcttgatcagctgctgagtcagagtactggcaccttcagaaaaaccgccccgggcaatacccactaccgcagcacgggcaataccctgaagatctataccgttatgcttataaaaacgctcatcctcgattgcaacaaaagcatgttgaagatttttcggtatctcatcaatagacttgtatactcgattggaaccagaagatacaaaacgttcaatctcagtgcttccgtcatcagcataaacgaaagtagtaaatcctttcggtttaacgtcagaagtggaaacatgcggagtgtcatcaataatcttttttataaaaagaccgccgccggccattccgactactgcagcaagtacgatacagatcagcagtgccttgaacaaacggacaacgatgcgtttcccctgcattgtagatttggacgttatttttttctgccttttcgcagcctttttctttccatagttcatgcgtttaagcctcctttataccaagttattatagcaaatgtacactcttttataaagaaaaaaatgaaaacttcatatttgagtaggaaaatcttaagaaattaggtattatattatgtataaagttgtaaattatacgaaaggatgacaatatgttaccagaatacagaactatttatcggggtggagaagatgagattatagaaaaaaagtcacgatttattgcgactgtggtaccggtaaatacagaggaagaagcacttgaatttgtagagaagacaagaaaaaaatactgggatgcaagacataactgttttgcatatataataggggagagaggacagcttcaaagatgcagtgatgacggcgaaccaaacggtacagctggcaaaccgatgctagatgtattgcttggaaatgaactgaggaatgtggctgttgtggtgacccggtatttcggaggaacccttcttggaaccggtggactggtcagagcatattcgggagccgtgaaagcgggacttgatgcctcggtgatcattacgaaaattttaggagtgaaacttcatatagaaacagactatacgacatttggaaagattcagtatattctggcgcagagagagctgaagatattagatactgtctatacggataaagtagaactggaagtactgattccaaaaacggatgtggctcaggttatgcatgcaattactgaggggacaaatgcgcaggcagagatgacagcaggtgaagaatgttattatgcagagattgatggggtgccgacaattctggaagaaaatataatataaaaataatataaaaaagccgtacacgatatctcatgaaaggagctgttctttaggagatattgtgtacggcttttgttattgccatatttttataagattatgagttgcgatttaagaaaattcaggctcgatcaaaccaaatgttccgtttttacgtctgtatactacattcacttcgtctgattctgcattacagaaaacatagaaatcatgtccgagaagttccatctgaacacacgcatcttccggatacataggtttaaatccgaattttttggtacgtacgattttaatctcgccgtcatcttcaatattatcttcggcgtcaaagaattcctgtttgaagttaccgccttcctgttcacgtgctaccagtttatttttgtatttacgaagttgacgttcgatgacttcttctacaagatcaatcgatacatacatatcagaactttcctgttcggaacgaaccagaccaccctttacaggaatagttacttcaattttctgatgtcctttctgtacacttaaggttacgtgaatctctgtattcggagtaaagtaccttcctaactttcctaacttgctttctacggcctctcttaagcctggtgttacatcgatgttctttccaataataataaatttcatgatgcccaactcctttgcgacataatttcaaataattgcacgttatacaatcatcaaataaatgaattataatctgacaattgctactcgaaccggcaatctatctgatatgtgtagtataacatgtttggccgctaatgtatagcacgaattacctgaattcttgaaatttttccatcatgaagtttggcaacccgcagaccgcaatcgtggaagtaataacatgcaccaacacggggcgtgatattctgttcttcgagatgccgcagcagtacattggaaagggtatcatctgcttcatgcggaatgttcacgctgagaatcttgttgacaactttagccttggttgaagcacggaataccgtttcgtctgctatgtcgaattcggagaataagaattttctggttgcaaataagactgcgatggaacagacgccgatcagactgctgtagatggaagtgtggtccataatgatgtgtcttgcaatcgcaaaaagcagaacctcaaatacggtactcggagagtgcgaatacatcatacggatcaattcgacaccgatgatcagattaaaacaaacctcgagaagatcatcgtaattcggataggtgttcagattcggaatatactgaagtgaacataccatacgaaggcaaagcagtatgataccgatcgcaagcataaatgcaatcacatattccagaattgcggccacctgtttgagaaggtgagaaatcagttctttcattcgtggattcctttcttttatatagattttcgctgtaattccagtataagtgaaaaaaagatatttgccaatatcccaaagaaagatatcatatcaaaatgaagaacaatggagaaggaaaatttttagtaatgtgtgctgcagatgagaacaaaaaagcggcagaaaataaaatatataaattgtcaggttttcgtgaacaaaaactgttttatatattttattttctgccgctttcgtgcggtcagttataaccgtaaatgtttattcattagcgatttacacgttttctcatcttaggatccagaatcttcttacgaatacggagtgattccggagtaacctccagaagttcatctgtatcgatgaagtcgattgcctgctccagactgaggactgtcggaggtgtcagacgaagtgcatcatctgcgctggaagaacgagtattggtaagatgcttggtcttacatacatttacttcgatatcatctgtttttgcattttcaccgatgaccataccggaataaactttttcaccggcaccgatgaagagtgttccacgctcctgagcactgtacagaccataagttacagactcaccggtctcgtatgcaatcagagatccctgtttacgatactggatatctcccttatatggagcgtatccgtcgaatgcagtgttcatgataccatttccctttgtgtctgtcaggaaatcaccacggtaaccgatcagaccacgggatgggatacggaactcaagacgtgtatatccaccattggcagcacccattgtctgtaattcaccttttctctggctcagtttatcaataacgacaccagtgtattcatcaggtacatcaatgtaagcaatctccattggctcaagaagtttaccattctcgtctttgtgatacagaacctcagctttgctgactgcgaattcatatccttcacgtctcatattctcgattagaacggaaaggtgaagttcaccacgtccggatactttgaatgcgtccatgttttcggtatcttcaacacgaaggctgacatctgtgttcagttcgcgcatcagacgatcacgtaagtgacgggaagttacatattttccttcctgtccggcaaatggactgtcatttacaacgaaatccatagagattgttggttcagaaatcttctggaacggaattggtgtcggattttcaggtgagcagagtgtatcaccgatggaaatgtcagagatacctgaaattgccacgattgcaccgatagatgcttcttttacttctactttctgcagaccgtcaaattcatataatttactgatcttaactttcttctgtttgtcaggatcatgatggttgacaacaaccatgtcctggttaactgcgattgtaccgttatctactttaccaacaccgatacgtccaacgtattcattatagtcgatcgtactgatcagaacctgagtcggagcttccggatctccttctggtgcaggaatataatccagaatggtctcaaacagaggcttcatgtctttcatttcatccgaaatctcaagtgcagccacaccattcttagcggatgcgtatacgaatgggcagtctaactgttcgtcagaagcaccaaggtcgatgagaagttcgagaacttcatcgatcacttcttcggctcttgcttccggacggtcgatcttgttgatacatacgatgactggaagctttaattccatagctttgcggagtacgaatttggtctgcggcatagctccctcgaacgcatcaacgacgaggataacaccgttaaccatcttaaggacacgttctacttctccaccgaagtcagcatgtcccggagtatctataatattgatctttacaccgttgtaggtgacggcagtattcttggagaggattgtgattccacgttctctttcgatatcgttagagtccatgacacgttctgctacttcctgattctcacggaatacaccgctttgctttaataattcatctactaatgttgtcttaccatggtcaacatgggcgataatcgcgatattacgtacatcttcacgttttgtcttcattacgaatcttccttttctctacctattattatctgcaaccacattagtttatcacattttttaaaatttacaagtatttagttctaaaatactgatttgattcatagactttgtaatgactcaaaatacgattcagaggaagggagattacaaaattatgtcagataagatgattgagaacaaccaggtaaccgttatgggagaaatcgtgacaccattttcattcagccatgaagtatttggagaaggcttctatatggtagaggtggatgtgaagcggctcagcaattccaaagacaggatcccactcatgatctcggagcgtctgattgatgttacgaaagattacacgggagaattcattatggtaaacggacagttcaggtcctacaacaggcatgaagaaatgaaaaaccgtctgattttatccgtatttgtcagggaaattacatttgtggaagaagaacttgacggtgcaaagacgaatcagatttttctggatggttatatctgcaaacagcctgtttaccgtaagacaccgcttggcagagagattgcagatctattgctggcagtgaaccggccatatggaaagtctgattacattccatgtatctgctggggaaggaatgccagatttgcctctgcttttgaggttggagaacatgtgcaggtaatgggaagaattcagagccgtgaatatatgaaaaaaattacagaaacggaatcgcagaaaagggttgcatatgaagtgtcggtcagtaaactggaatgtatggatgaataagggatggtaaaagtttagataagggttcggattgacatcatatttaattgatgatagaatttcattagattatatgaaagtcaggaggatcactatggctatttttacaggagccggcgtggcaattgtcacaccatttaatgaagatggaagtattaattatgatagacttgatgaattgattgagtttcattgtgagcataaaacagacagcattgtaatctgcggtacaacaggagaatctgctaccatgacagaagaagagcatatgcagtgtgtaaaattcacaattgaccgtgttaacaagagagttccggttattgcaggaacaggttctaattgtacacgtactgctatcgatatgtcgaaggaagcttcagaatatggggcagatggtttacttttggttacaccttattataataaagcaactcagaatggactgatcggacatttcagtgcagtggcaaaagaagtaacagcgccaatcattatgtatagtgttgcaagcagaacgggatgcaatatcgaacctgcaacagcagcaaaactggtgaaagaagtagataatatcgttggtataaaggaagcatcaggaaatatttcgcaggttgcaaagatcatgaacctgacagacggtaacattgatgtatattcaggaaatgacgaccagatcgtgccggtattatctctcggtggaaaaggtgtgatctcagtactgtcaaacgttgctccggatgaagcacatgatatctgtgagaagtattttaacggagatgtgaagggaagtgcagcacttcagctgaaagcactgccgctgatcgagcagttattctgcgaagtaaacccgattccggttaagaaagcaatgcagctgatgggagttgactgcggaccacttcgtatgccgcttacagagatatcccctgaacatgagaagaaccttgcacaggcaatgaaagatttcggtattcagttagcataataagaaaaagagaaggatatcatacatcgccatgcgtttgtaagaaactgccaacggcaggctttcacagatgcattacatatatgatatcctttgtttttataacaaagtatacaaaaggaggataagaatatggtaaaagcaatcatgcatggctgtaatggacacatgggtcgtgtcattacagatataatcaagaacacagaagggatcgaactggtagccggagttgataaatataccaaagtaccaaatgactatccggtatttgaaagcatcgatgcatgtgacgtggaggccgatgtgatcattgatttttcaaatgcggcagcagcagatgaactgcttgactattgtgttgaaaaacaggtgccggtcgtactttgtactacgggactttccgaagaacagctggaaaaggtagaagaatcagcaaagaaagtagcagtattaaaatctgccaatatgtcacttggcatcaatctgcttatgaagatccttaaggatgcgacaaaagtactttctccggcaggatatgatattgagctggtagagaagcatcataaccagaaactggatgcgccgagtggtactgcacttgctctggcagattcaattaatgaagcggcggataatcagtatcattatgtatatgacagaagtcaggtgcgtcagaaacgtgatcagaaagagattggcatttcggcagtacgtggtggaacaatcgtaggagaccacgaagtgatctttgcaggtcaggatgaagtgattgaattcaaacatacagcatattctaaggccgtatttggaaaaggcgccgtagaagcagcaaaattcctggcttggaaaccggccggcagatatgatatgtctgacgtgatccaattataaatcgttatgaacagcagaatatacaggaagaccgggaggtaattatgagacaattagaggaacgttatctggaaagactttctcaactatatccgaccatcgccaaagcttccacagaaatcattaatttacaggcgatactgaatctgccaaagggcacagagcattttctgacagacattcatggggaatatgaggcatttgcgcatgttctgaagaatggctctggttcagtgcgccgtaaaattgatgatgtattcgggaatactatgagtagcagggataaacagacccttgctactcttatttattatccgaaagagaagatggaccggattaagaaaacggagaagaatatggaggactggtataagattacgttgtaccgcttgattgaggtgtgtaaaagaacagcaagtaaatataccagatctaaagtaagaaaagcacttcctccggattttgcttatgtgatcgaggaactgatcacagagaaaaatgatatgacggataaagaatcgtattataatgcaattgtcagtacgattataagaattggacgggcagagaaattcattatagctatgagtgaactgattcaacgtctgacggttgatcatctgcatattgtcggagacatctatgacagaggtcctggaccacatattattatggatgagcttatggcgtaccattcggttgatattcaatggggaaatcatgatgttttgtggatgggagctgcagcagggcagagaggctgcattgccaatgtgatccgtatctgtgcaagatatggcaacctggatatcctggaagaaggatatgggattaacctgcttccgctggctacatttgccatgaatacatataaagatgatccgtgtgagtgctttaaattaaaaggcaatccggattacaatgcaacggaaatgttgatggatgtaaagatgcataaagcaatttctgtgatccagttcaaagttgagagccagattataaaaaagaatccgggatttaagctggaaaagcgcaatttactgcatcatattaattatgaaaaaggaacgatagagttagaaggaaaagaatataaattgctggataaaaattttccgacgatcgatccgaaaaaaccatatgcgctgacgaaagaagaagaggatattatggaacgtctggaacgggcgtttgaaaactgcgaaaaattacagcgtcatatgcatttccttttaaacaaaggtggattatataaagtatataacggcaatcttctttatcatggctgcgtaccgttaaaagaggacggtaatttgaaaagtgtaaggatctttggccgggcgtataagggcaaagggctttatgaagtacttgaaagttacgtgagaaaaggattctatgctatggatcctaaagaaaaagaacgtggaaaagatatcatgtggtatatctggctgagtgaaaattctccgttgtttggaaaggataagatggcgacatttgaacgctatttcctggcggagaaggaaactcataaagagaagaaaaatccatactaccttttactggaagatgaaaaagtagtggaaaaaatattgaaagaattcggacttgagaacgaagatgcgcatataatcaacggtcatgtgccggtaaagtgtaaagatggagaaaatccggtgaaatgcggtggaaaagttctggttatagatggcggattttcgaaagcttatcagaaagagaccggaatcgcaggttatacactgatctataattcctatggattaattctggcggcgcataagccatttgagtctacagaagcagcgatcgaaaaggaaagtgatattcattcggacagcacggtggtaaagagaacgctggaacggaagaaagtagaagatacagatgtcggaaaagagttaaaagaacagatttcggatctggaagtacttctggctgcatacagaagtggtgtgattgctgaaagaatgtaaaaatataccagcattctgataaagaaaaattcgtatatatttctggaaaatgcagatattactggtaacaagtaatacttgatcatagatgaagatatacgaagggagattatgagaatgaaacaattgaagaaattcatgctggtattcatgtgcacggggatcatgatggggcttaccgcctgtggaaataatacagatgataatgcggcgaatgataactcggcgacagaaggtacaaccggaacagatgatacagtaaaggatgatgtaacagaccggaataatgaaaatgatggagttatggatgaaatcggagatgatgtacaggatggtgtagatgatatcgaagatgatatcgatccgaatgacagaaaaaatgagacggaccagaataatgacggaacaacagaccagaaccgggataacactaataaaaacgatacgaaaaacgcaaaataatagatagtatataaggatgtggggaaatgataagtaaaatctctgcatccttattttgtacagtatatctgtactggacgctgatactttagtgtgataaaatgttttgaaaaaagaatataatcaagaatatgataaggagaaaagcatttatgaaattcagaccatgcatcgacatacataatggaaaagtgaagcagattgtagggggcagccttcttgatcagggagatcaggcggtagaaaactttgcggcagatcaggaagcagattattttgcaaatttgtataaaaaggacggcttaaagggaggacatgtaattctgttgaatccttcaacttctgaatattatccggagacaaagaggcaggctttgaaagcactgcagacatatcaggatggattgcagattggaggaggaattacggcagaaaatgcagaggaatatatgaaggccggtgcaagccatgtaattgtaacatcgtatgtatttaagaatggagaaatctactgggataatctgcaaaatctgtgtgatgccgtcgggaaagaacatgtggttctggacttaagctgcagaaaaaaagatgaaaaatattatattgtgactgaccggtggcagacatttacgaatgtggagctgaatacagatattttggaaaaactgtcaggatattgtgacgaatttctggtgcatggtgtggacgttgagggaaaggcgtccggaattgaagaagagctgataaagattctggaacaagccgaaataccggtgacatatgccggcgggattggaagtcttgatgatctggaacgtattcggaaaattggtaatggaaagattgattttacaatcggaagtgcgttggatctttttggcggaaagattccgtatgatgttataaaaaattatcgttagagaaaagggaaaccttcgtaaacaaagtgttaacactttataaatcggttgaattgaaatatagatagtgataaaatggggaatagagtggtcgttttgcgtccataatcaggaataaggagcacatagcgaatgaatattatacagaaaatatttggaactcacagccagaatgagttgaagagagtttatccgattgcagatgcagttatggcactggatgaagacatgcagaaactttcggatgaggaattaaaagcaaagacaaaagaatttaaagaacgtctggaaaatggcgagacattagatgatattctcccagaggcatatgcggtagtaagagaagcagcaagccgtgtacttggaatgaagcactaccgtgtacagatcgtcggtggtattatcctgcatcagggacgtatcgcagagatgaggactggtgaaggtaaaactttagtggcaacacttccttcgtacctgaatgcgttggagggaaaaggtgtacatgttgtaaccgtcaatgattatctggccaaacgtgatgcggaatggatgggacaggtacatgagttcctgggcctgactgttggtgtagtactgaacagcatggataatgatgagagacgtgccgcatatgagtgtgatatcacatacgtgacaaataatgaacttggattcgattatctgagagataatatggtgatctataaagaacagctggttcagaggggactgaattatgctctgatcgatgaggtcgattcagtattgatcgatgaggcgagaactcctcttatcatttccggacagagtgagaaatctacgaaactttatgaagcatgcgatatacttgcacgtcagttagagcgtggtgaggcaagcggcgagtttaccaagatgaatgccatcatgggtgaagatattgaagagacgggagactttattgttaacgagaaagagaagaatatcaaccttaccgaagatggtgtgaagaaggtagagaagttcttccatattgaaaaccttgcggattctgagaacctggagattcagcacaatattatccttgctcttcgagcacataatctgatgttccgcgacaaagattatgtggtaaaagatgacgaggtactgatcgtagatgaatttaccggacgtattatgccgggacgtcgttattcagacggactgcatcaggcaattgaggcaaaagaacacgtaaaggttaagagagaaagcaagactctggcgactatcacattccagaacctgttcaataaatatgcgaagaagtctggtatgacaggtacagccctgacagaagaaaaagagttccgcgagatttacggaatggacgttatcgaaattccgacaaatctacctgttcagcgtaaggatcttgaagatgcggtatataagacacagaaagagaagttcagagctgtatgtgatgcgatcgaagaagcacatgcaaaacatcagccagtactggtcggtacgatcacaatcgataattccgaactgttaagcggtatgttaaaacgccgtggtatcaagcacaatgtattgaatgcgaagttccatgaactcgaggctgaaattgttgcacaggcaggtgttcatgatgcggtaacgattgcaacgaatatggcaggtcgtggtacagatatcaaactggacgatgaggcaagggcagcgggtggtcttaagatcatcggaaccgagcgtcatgaatccagacgtatcgacaatcagctgcgtggacgttccggacgtcagggagatccgggagaatccagattctatatttccctggaagatgatctgatgagattgttcggatcagagagactgatgaatgtctttaatgcacttggtgtggaagacggcgaacagatcgagcataagatgctttccagtgcgattgaaaaagcacaggagaagatagaaagcaacaactttggaattcgtaaaaacctgctggaatatgaccaggtaatgaacgaacagagagaaattatttatgaagaaagacgtcatgtactggacggagacaacatgcgtgattctatcttccatatgatgaatgattatatagagaatgttgtagacatggtggtcagcccggatcaggattacgatgagtggaatctgacagaactgaacctgacgatccgcaatacgattccgatggaaacgattacagaagaagatgtcaaggatatcagtcagaaagagctgaaacatatgctgaaagagcgcgcagccaaggtttacgaggcaaaggaatcagagttcccggaaccggagcatatgcgtgagatcgagcgagtagttcttctgaaagtaatcgatgcaaaatggatggatcatattgatgatatggatcagttacgtcagggaatcggtcttcaggcttatggacagagagatccaaaggttgagtataagatgatcggttacgagatgtttgatgagatgacaagaagtatcgaagaagatacagtccgtacgatcctgcacgttaagctggagcagaaagtagaaagagagcaggttgccaaagtaaccggaaccaataaggatgatacgggagtgcgtgagcctaagaaacgtgcagaaaagaaagtatatccgaacgatccatgcccgtgcggaagtggaaagaaatacaaacagtgctgcggacgtaagaactagatttattgaaatataagatatgagaagacggcagccggggaaagaacggctgccggataattaagcatataatttcaaacagaaagaggtggtaatatggttgaattagatcagttcaaaacaataatgaacgcttatgaagaacctcttgccgaaatgagggattcactttgacgttgcaggaaaagagcggagaatcgaagaactggaacgcaagatagaggaacctgggttctgggataatccggaagaatcacaggaactgatgaaagagcttaagaatttaaaagaacttgtagagacgatccacggtctctatacttcttatgaagatatcaatctcctgatcgagatgggatatgaagacgaagatcctgcaatggtaaaagaactggaggaagaaattcatacatttgaaaaggtgtttgaaaagctgaagatccagacgttactgtcgggagaatatgatgcatgcaatgcaatcatgaccattcatgcaggagcgggaggaacggaatcctgtgactgggcaggcatgttataccgtatgtactgccgttgggcagagagaaaaggattttcgcttcaggtgctggatttcctggatggcgatatcgcagggattaaggcagttacttttgaggtaaaaggtgagaatgcttacggatatctgaaatcggaaaaaggagtgcacaggctggtacgtatttcaccgtttaattctgccggtaaacgacagacatcttttgcatcctgtgatgtgctccctgatctggaagatgatattgatattgaaattgatgaagatgatctgaaaatcgatacttaccgtgccagcggtgcgggaggccagcatgttaataagacatcttcggcaatccgaattacacatctgccaaccggaatcgtggtgcagtgccagaatgaaagatcacagcatcataataaagaaaaggcaatgcagatgttaaaggcaaaactgcagcttatgaaagagcaggaacaggcagaaaaagtatcggatatcaggggggaagtaaaagatatcggatttggtaatcagatcagatcttatgttatgcaaccatatacactggtgaaagatcacagaacgaatgaagaaaacagcaatgtaaatgccgtgatggacggggatattgattcatttatcaatgcatatctgaaaaaaatcgcaaacggctaaaaggagggaatatatgatcaatatagcagtaatgggctacggaacagtaggttccggagtggtagaagtgattaataccaacggagcgcgcatcaatcagcgaatcggtgatgagctgaacattaaatatgtactggatatgaaggatttcccgggggatccggtgcaggagaagatcgtacatgattttgagacgattgtttcggatgaagatgtacagattgtcgtagaagtaatgggaggaatcgagccggcctatacgtttgtaaaacgctgccttcaggctggaaaaagcgtggcaacatcgaataaagcactggttgcaaagcatggggctgagcttctttctatagcagcggaacatgatattaatttcttgtttgaagcaagtgtcggaggcggtattccaattatccgtccgcttaattcttcactgactgcagatgagattgaagagatcacaggtattctgaacggaactaccaattatatgctttccaagatgttttatgaaggtgcggactatgacactgtattaaaagaggcacaggcgaacggatatgcagagagaaatccggaagcagatgtggaaggatatgatgcatgcagaaagattgcaatcctttcttctctgatctcaggacagcaggttgattttgaagatatttactgtgaaggaatcacgaagattaccgttgaagatatgaagtatgcaaaagcaatgggaacaacgatcaagctgctggcatccagcagacgttatgcgggtaacagattgcatgcaatcgtggcaccatgtatgttatatccggaacatccgctttataatgttaatgatgtgttcaatgctattttcgttcatggaaatgtattaggggatgcgatgttctatggaagcggagccggaaaacttccaactgcgagtgctgtagttgcggatgttgtagatgaggcaaagcatctgaaccgtaatatcatgacgatgtggaaagaagaaaagcttcaactggaagacaaggcggattccaagagaagattctttgtacggataaaaggcaaggaagaggagctggttccgcagctgaaggaatcatacggagagattgaagtggtaaaagtaccggaactggaaggagaatttggatttgtaactcctgttatgatggagggagattatgagaccagatcaaaactttacaaagagcagatcgtacatatgatccgtattcaggattaatcagattggtctgtcacaggaggaaacatgttaatagtaaaaaagtttggcggaagttcagtcgccaataaagaaagaatattcaatgtggcaaaacgctgtattgaggactacagagccggacatgacgtagttgttgtcctttcggcaatgggagatacgacagatgatctgatcgcactggcgaatacgatcaatccgaatgctaaaaaaagagagctggatatgctgcttacgacaggtgaacaggtatcagtgtctctcatggctatggcaatgcaggcactggatgtgccggcagtatctttgaatgcttttcaggttatgatgcattccacatcccgttatggaaatgccagatttaaaagagtagacacagagcgtatcatgcacgaactggattcgagaaagatcgttattgtaacaggttttcagggtgttaacaaatatgatgatattacgacactcggacgaggcggttctgatacaacagctgttgcgctggcagctgtgttacatgccgataaatgtgaaatctatacagacgtagacggtgtgtttacagcagatccaagagtagtaaaaactgcaaagaaactggatgccgttacatacgatgagatgcttgagcttgcgagtcttggggcaaaagttcttcacaaccgttctgtggaaatggcgaaaaaatataatgtggaattagtggtacggtcaagtttgaaccgttcagaaggcaccgtagtcaaggagggggcaaatatggaaaaattactggtcacaggtgtggctgcagataaggatactgtcagaatatctgtcattggattagaggacaaaccaggaacagcatttgctgtattcaatacactggctgctaataatattaatgtagatattatcctgcagtctgtcggaagagaaggaacaaaggacatttcctttaccgttgcatcggatgatcttgaacatgcaattgaagtgctgaatgcaaataaagaaagacttacaattcaggatattacctggaacgaaaaagttgcaaaactttcaatcgtaggtgcgggaatgatgagcaatccaggagtagctgcgaaaatgtttgaatcattatataattccagagtgaatattaatatgatttcaacatctgaaatccgtattacagtactggttccggaagaagatattgaaaaagcaatgaatgcggttcatgatggatttggattgggagcataagtataaagatattataagttggattatttatcagaattaagaaagccggtaacaattttacgctgttcatcagaggaagaacggaatgcaagaataaggttcagttcttcttctgtgagatagatatagttaccggtatttttttcgataccctgcatatatggagtttttgactccatcataacagaagaagggtcggagtcagcagtgaaaccttcggctttgagatcgtggagaatcagctggtcaagcgttacgtgaaaataagcagcaaaagaagccagaacatcaagatcgggtgtacgcgtacttttttcataattactgcaggcctgacgggtgatattgaataaattggcaatatcatcctgcttcagattatataatgttctgagataaagcagatttttggccagttgaatgtttgccattttatacctccataagttacatgttcctgttagtataacaatctggccattaaatgaatatgatatgcaacgagacgtgacaaaaacaagaaaagcaacaaaatgttgctttccttaaagagtgtttagataactgttgtgatatttccctgaaaaagttacatcttcaccaaaccagtccggaggtgaaaaagaattggcagcatcttcggtatcaaactcgacctctacaagcatgaggggagcaagatcgccttcaaagatatccagttctgcagtaagcgctgaagaaagtggaatcatataacgctttttctttataaggcggccgtcaattttggtaagaagatgttcataagatttgtcgtccagagggagattatattcctggcggctcatgagaccggctgatttgtaagtgagttcataacgatcgttatcacgtcggatccgtactacggggctggtattgagatagccttgctccagaatacggcagggataggattccagcggaccgggaagatgtaagacaagatattttcgttcgatttccatattatatagctcctttcattcatggtgaaattatgatacaacagtttacagaaaaagtaaacggtgataaacttttataataattgatgtcactggaaagtaaagcgggacatcggattaagagatgaggaggaagaaagcatgaaaaaagtatgtgtgttgttagcagacggatttgaagaaattgaaggattgacagtcgttgatctgttaagaagagcaaaaatatatgtagacactgtttcgattatggatgattatatcgtgcatggtgcgcatggaatcaatgtacagacagaagatctgtttgatgaagttgattttgaagaatttgacatggttgtattacctggaggtatgccgggaacattaaatttaaaagaacatgacggtgtcagatatgtagtgaaacaatatgcaaaagaaggcagattcgtgggtgcgatctgtgcggcaccgacgattttaaaaagtcttggcctgctggaaggaagaagggcaacctgttatccgggtgtagaagatgagatggagaatgtcattctgacagagactgctgttgtagtagatgataatatcattaccagtcagggcgtcggcacagcgattgattttgcactgaaactgatcgaggttctggatggtgaagaaaaagcaaaggaaatcgcagaatcaatcgtgttttaatcaaatttaataaatattgatgaaaaaaagcggaaaaataccggatttaagcaaaaacgggggctagatatttaccagagtttgtgttatacttctgtggtgaatgtattgtagtacacccgctttttttccgctacccatgaggcgggttagaaacaggaggaaatgataaatgagtttacaggtagaaaaattagaaaacaacatggcgaaacttactatcgaagttccggccaatgatttagaaaaagcgcttcagagtgcatatatgaagcagaagaacaaaatcgctatgccgggattccgtaaaggaaaagttccgcgtcagatgatcgagaagatgtacggaccagaaatcttctatgatgatgcagcaaatgcgctgattcctaaggcatactcagaagcatatgatgagtgtgatcttgaaatcgtatcaagaccagagatcaacatcgttcagattgaaaaaggaaaatcattcatctttacagcagatgtagcaacaaagccggaagtaaaactcggtgaatataaaggactggaagtagataaagtatctacacgcgtaacacagaaagaagtagacgctaagatccaggaagaagcagaaaagaatgccagagaagttgtagttacagaccgtccggtagcagatggtgatgaagtgattcttgactttgaaggattcgttgacggtgaagcattcgaaggtggaaagggtgaaaactatccactgacaatcggttcaggatcattcatccctggattcgaagaacagttagttggtgctgaagctgagaaagaagtagaagtaaaagttactttcccagaagattaccatgcagaagaattaaaaggaaaagaagctgtattcaaatgcacagttcatgagatcaaggcaaaagaacttcctgagatcgacgatgaatttgcagcagaagtttcagaatttgacacattagaagaatacaaagctgatgtaaaggctaaaattaaagaacagaaagcagcagacggaaagagaaatcaggaagaccaggctgttgagcaggctgttaagaatgcagaatacgagattccacagccaatgatcgatacacagacaactcagatggttgaagatttcgcacagagaatccagtctcagggaatcactcttgaacagtacttccagtttacaggtctgacagcagagaagatgatggaagacatgaaaccacaggcaatcaagagaatcgaaacccgtctggtacttgaagctatcgcaaaagcagagaacatcgagattacagatgaaaaagttgatgaagaactggctaagatggcagagtcttacaaaatggaagttgaaaaactgaaagagttcatgggtgagaacgagaagaaacagatgaaggaagatctggcagttcaggaagctgttacattccttgttgagaatgcagtagagaaataagaacgtcagataacaacatagtatagtcaggaggcatatacatgagtttagtaccttatgtcattgaacagacaagccgtggagaacgttcttacgacatctattcaagattattgaaagacagaattatatttctaggtgaagaagtaacagatgtatccgcaagtgtgatcgttgcacagcttctgtttctggaagcagaagatccggagaaggatatccatttgtatattaacagcccgggaggttctgtaacagccggaatggcaatttatgataccatgcagtatattaaatgcgatattgagacaatctgtatcggtatggctgcaagtatgggctcattccttcttacaggtggaacaaagggcaaaagacttgcgcttccaaattctgagatcatgatccatcagccacttggtggagctcagggacaggcaacagagattcagatcgcagcagatcatatcttaaaaacccgtcagaaactgaatcagattctggcagaaaatacaggacagccgttagaggtgatcaatgcagatactgaaagagataatttcatgactgcggaagaagccaaagcatatggtctgattgacgaagtcattaaaagccgctaaggacgtcctcagacgaggtgaagagtatggtaggaaagaacgatgatcaggtaagatgctcgttctgtaataagacgcagaatcaggtaagaaagctgattgcaggccctaatggggcatatatctgtgatgagtgtgtagatgtctgcgcagagattatagaagaagaatttgaatacgagaacggaagagaatggaatccgttctcggatatcaatcttttaaaaccggaagagattaaagcattcctggatgaatatgttattggtcaggatgaagctaagaaagtgttatccgtagccgtttataatcattataaacgtgtgatgtcaggaaaagaactgggagtagaactcggaaagagtaatattcttatgcttggtccgacaggctgcggaaaaactcttttagcgcagacactggcaaagattctgggagtaccatttgcaattgccgatgcgacagcgcttacagaagcaggatatgtcggagaggatgtagaaaatattcttttaaagattattcaggctgcagatggggatatcgaacgtgccgagtacggaatcatttacattgatgaaattgataagattacaagaaaatcagagaatccatcgatcaccagagatgtatccggtgagggtgtgcagcaggcacttcttaagatcatagaaggaaccgttgcgaacgtacctccgcagggaggaagaaagcatccacatcaggagatgatccagatcgatactacgaatattttatttatttgtggtggagcctttgaaggaattgagaagattgttgaaaaacgtattgatcagaaatcaattggatttaatgcagagattgcggagaaacatgaagacgatgtagacagactgcttcagcagatattgccacaggatcttgtgaaattcggtctgattccggaactggtgggccgtgtgccggttacagtagcattagagatgctggacaaagatgcattggtaaagattcttacagaaccgaagaatgcattgacaaaacagtaccagaagatgcttgaactggacggtgttaagcttacatttgataaaaaagcactggaaacaatcgctgagacttccctgaagagaaagacgggagccagaggtttgagagcgattatggaaaatatcatgatggatgtcatgtataaggcaccatcggatgagacattgaagacatgccgcatcacagaggatgttgtaaaaggaacgggagaacctgtatgtgaacatgcagaacctgattcagaaagtgcataataaatgaaaaagaaagacggcgggtgcgaagaaatattgtacccgctgattttgtaccaaaataatccaaccgatgaacaggagtgtgaatatatgacaggagaaacctatagtctgcctatggttgccttaagagggctcaccatactgccagaagaggtcagacattttgatgtaagcagggaaaaatcactgctggcaatcgaagaggcagtaaaaaacggacagaaattattcgtcagcgctcagaaagatctggaaacagaggagccgggcgcagaagatgtatatctggttggctgtgtggtaaccataagacaggtggtaaaattaccgaagaaaatgagtcgtgtacttgtatccggagaagcaagagcaagtcttgtaagactggacagtgagacaccatatcttcaggcaacggtagtagaactgccggatgatgaagatgtatccgaagaacagacagcggaaaatccaatgaatctcgaggcaatgatccgtggattacaggatgtatttaaagaatacttgttgaagaatccaaaactttcaaaagagctgggaatgcaggtagaggcaatccgggatctgaaacatctcgtagatgtaattgcggcaaatatgccatttgcattcgaagacgcacaggaattactggaagagacgaatcttatgagacgatatgagctgctcatatataagattgtaaatgagattcaggcccagaaggtaaaagaagagatccagagcaaagtaaaagaacgcgtggataagaatcagagagaatatattttaagagaagaactgaaagtgatccgtgaagaactaggtgatgacaatacgatgtcagatgccgatgagttccagcaggcagtggatgcactgaaggcttcgaaggaagtaaaagaaaagctgaataaagagatcaagcgtttccgtaattcgatgaattctccggcagaagtaggagtaatccgtacttatatcgaaacgatgctggagatgccttgggataagacatgtaaagaacacaaagacattgcatttgcaagacaggtgttggatgaggaccattatggtctggaaaaagtaaaagagcgtgtactggaatatcttgcagtgcgtgcgcttacgaaaaaaggagaagcaccgatcatttgtctggtgggtcctccgggaaccggaaagacatccattgcgaaatctctttccagagctctgaagaaaccatatgtcagaatctcactgggcggtgtccgtgatgaagcagaaatccgcggtcacagaaagacctatgtaggtgcaatgccgggaagaattgcaaatggaataaagcaggcaggagttaagaacccgctgatgctgctagatgagatcgataaggtcagcaatgattataagggagatacattctctgcacttctggaagtactggatggagagcagaataataagttcgtagaccattatctggaagtaccgattgatctgtcagaggtgttatttatcacaacggcaaacagtctgcagacaataccaagaccgcttctggaccgtatggaagtgattgaggtaaccagttatacagaaaatgaaaagcttcacatcgcacaggaacatctgattccgaagcagatcgaaaagcatggcctgaaagcagatcaggtaacgattagtaagaatgcaatctggaagatggcacgaaattatacgaaagaagccggtgtccgtcagttagagcggaagatcggagacatctgccgtaaagtagcgatggaaattctggagaaaaagaagacatcgacacatgtgacagaacgaaatctggaacattatcttggaaaagaactgtatagctaccagatggcaaatgaagaagacgaggttggcatcgtgcgtggacttgcatggaccagcgttggaggcgatacccttcagattgaagtgaatgtgatgccgggagagggagagatccttctgacaggccagcttggcgatgtcatgaaagaatccgcaagaacaggaatcagttacatccgttcggtaagcaaggaacatgatattgcagatgacttcttcaagaaacacgatatacatatccatattccggaaggagcggttccgaaagacggaccgtctgccggcattacgatggcgactgcaatcatgtcggcagtaacaggaagaaaagtacgtgcagatcttgccatgacaggagagatcacactgcgcggtcgagtacttccgattggtggtttaaaggaaaaacttctggctgccaagaatgcgggaatgaagaccgtacttgtcccggcgaaaaatgaaagagatgtagaagaaatttctacagagatcacaaagggactggagataaaatttgtaacacacatggatgaggtgctcaaagaggcactcgtatagtcagatcttctgacacaggtcaggagatgaatcaaaggagaaatatatgataatcagaaatattaacctggaaaccgtatgtggaatcaccagcaagcttccggagaatacactcccggagatcgcatttgcagggaaatccaacgtaggaaagtcatccctgatcaatgcacttatgaaccgtaaatcttacgcgagaatatccgcaacaccgggaaagacacagacgatcaacttctataatatcaatgaagaattatatctggtagacctcccgggatacggatatgcgaaggtatccgaacaggagaaaatcaaatggggacagctgatcgaacgttatctgcatggatcaaaacagctgaaagttgtcttccttctgatcgacatccgtcacaaaccatccggtaatgacaagatgatgtatgagtggatcgtgtcacagggcttcaatccggtgatcatcgcaacaaaacttgacaagatcaaacgcagccagaaagataaacagatcaagatcgtaaaagaaggtctgggagtgttgcctggaaccgttgtgattccattttcatccgtgacgaaacagggacgggatgagatatgggagctggtggagagtcagttccttaacgtttaatgcataaagcggcggatacccggccggaataaaaatacaaggtacattccttgtatttttattcctacgtttttgcatgcagtaatgattaaataacggaacagtatacttcggattcatggtgtcggtgatcgcaatgctcggaatctatcttgcaagaatgcgacgaggatcaatcagaagatgctgaagcggatcgttgcaggtgcatcaattgcgattgcctgtgtaaaattgttcctgtagaagaaaaaatatattgccatacatagaataaaaatgttgaaatatcacaatagagtttgtcaaagtcttgacaaactctatttcttttgttatgattagactatagtacgaacattggtctaaatatagcaaaaacaaatgaaaaacagcaagttcgatgagaagaaaggagaatatcatggatcttataacaaatatccagaagtattctattcatgatggtgacggaatccgtactaccgtattttttaaaggatgtccattgaagtgtgtatggtgtcataatcctgagacacagcgctttgaacaggagattcaatacgacagagagaaatgtaccggatgtggtgcatgtgcgcaagtctgtccgaaccatgcgattactatggaggaaggcagaccaaagcttgacaagaagttatgtacactctgtggaaagtgtgagaatttctgtacacagggaatccgtgagatcgtaggacagaaatatccggtgaaggcactggtaaaagaactgatgaaggatctgatgttctatgagcagtccggcgggggcgttacactttcaggcggtgaagtgatggcaatgtcaaccgattatatacttgaaattgcaaaagccttgaagaaagaagaagtatcgcttacaattgatacatgcggatatgttccgtatgagaaatttgaagcaattcttccatatgttaatacattcttatatgatgtaaaggtcatgaatccggaattgcataagcaatacattggagtagacaacaaattaatcttagataatcttgtaaagctttctgacgcaggggcaaggatctatatccgtatccctaccgttaaggaagtaaatggaaacgaagagaatatgaatgaaacaatccgtttcctgaaagaacatgatatccacccggcacaggtgaatttactgccgtatcacaatacaggaagcagtaaatatccaaagctggatatggaatataaaggtaacgacttgagtgcaccgacaaaagaagaaatggaagggtttgtaaaacttttccaggatgcaggtttttcaaacacaaagataggaggttaaaacaatggcagcaaaaagaggcatgaacgaaagaatccagaagttaagagagctgagtgttaccacaccggtacatatcgatctggaaagagcaaaaatcgagacagaattttacaaagaaaatgacggaaagtattctatcccggttatgagatctatggtgttaaaagagtatttctctaaaaagacactgtatctgggagagggagaactgatcgtaggagagaaaggaaaagatccacaggcatcacctacattcccggaactgtgctgtcacagcgtagaagatatgacagtcatgagcgaacgtgatctggtatctttccatacaacagaagaagacagaaaactccaggcagaagagatcatcccattctggaagggacgaagcatgagagagaaacttctcgcagcaatgactccagagtggaacgactgttattcagcaggtatgttcacagagttcatggagcagagaggaccgggacatacatgtggtggtgaacaggtattcacaacaggatatatggattataaagagaagatcaaaaaatccatggatgctcttgatttcatgaatgatcctgaagcatatgacaagatggaagaattaaaagccatggatatttcctgtgatgcagtgatcatccttggtgagagatatcacaaattagcactggagatggctgaaaaagaagctgatccggtacgtaaagaggaattaaaacagattgcggctaacctggaagttgttcctgcacatgcaccacagacatactggcaggcaatccagttatactggttcacacatctggcagttacaacagagctgaacccatgggatgcattcagtccgggacgtcttgatcagcatctgatcaaatactatgaagcagatacagaagcaggaattctggatgatgacaaagcaaaagaactcttagagtgcttatgggtaaaattctataaccagccagcacctgttaaagtaggtatcacattaaaagaaagtgctacatatgtagactttgcaaatatcaatacaggtggagttacaccggatggtaaagacggcgttaacgcagtcagctatctgatccttgactgcatggatgatatgaaactggtacagccaaactctaacgtaaccatcagcaagaagactcctgcacgtttcttaaagagagcatgtgagatctcaagaaaaggatggggacagccggcattctataatacagaagcacagaccatggagcttgttaatgcaggtaaatctctggaagatgcacgtcgcggcggatcttcaggatgtgttgagacaggagcatggggaagtgaggcttatatcctgacaggatacctgaacattcctaaggtattccagctgacactttataatggatttgataaagaatccggcaaacagcttggccttaagactggtgaagcaaaagacttcaagtcatatgatgaattatgggatgcattccagaaacagttaaaatatatcatcgatatcaagattcgtggaaacaacgtgatcgagaaactgtatgctgagaatatgccggcaccttgtctgtcagttgttacaaatgactgtatcagcaatgcaaaagattacaatgcaggtggagcaagatacaacaccaactatatccagggtgtaggtatcggaactgttacagactgtatcacagctgtaaaatataacgtatttgataagaagaatttcacaatggaagaactgcttgaagcaatggatcacaactttgaaggttatgatgcaatcttccgtatggtacatgataagactccaaaatatggtaatgacgatgactatgcagattctatcatgcaggatgtattcaacctgtatcatgatctgatcacaggacgtccgactatgagaggcggaaagtacggagtagatatgcttcctacaacatgccacgtatactttggagaagtaatcggagcaactgctaacggaagaaaggctaacatccctgtatcagaaggtatctcaccggagaaatcagccgatgtaaacggacctacagcagttatcaaatcttgcgctaagatggatcatcttgcaacagcaggaacacttctgaaccagaagttcacacctgatgtagtagcaggagaaaagggactggagaatatggcaagtctgatccgcagctactttgcaatggatggacatcatgtacagttcaacgttatcgacagacagacactgatcgaagcacagaaacatccggatgattacagagatctgatcgtacgtgttgcaggatacagtgacttcttccgtaacttaagcaaaccgttacaggatgagatcatcaaccgtacagaacagtcattcgaataagattaacaaaagtaaaaatatgatttttgggagcccgcgttttgcgggctcttttttagatatgttcagaagtgaaaaatgtgttatcatggggataaaggatatagaatcgagaagaacatatggaagaatggaggatgataaagatgaaaataacagtattagtagaaaacagcaccagctgccggctttatggagaacacggcctgtcagtgtatatcgaatatgatggaaagaagtatcttctggataccggagccagtacgttatttgcgaagaatgcaaaagaactggggattagtctggcagacatagataccgcattcttatcacacgcccactacgatcacagtggaggatttgaagcatttttcaaagaaaatgataaggcggaagtttatatgcaggacacttctgcggaaaattgttatttccgtacagaaaccggtgataaatatatagggataccggtgcagcttctggaggcgtataaagaacgattccatacattacatacagtatgtgaagtggaaaaaggagtctgggctgtgccgcattcgacagaaaatctggatggaatgggccgcagagcacatatgtaccgcaaagtgggcgatgaattcattgcagatgatttcgcacatgagcagagtatcgtatttgagacagaaaagggacttgtgatatttaacagctgctctcatggcggtattgccaatattgtaagagaagtgcagaacgcatttgcaggaaagaaaatatatgccgtcataggcggattccatatgatgaagctttctggactggatacccttgggattcctgtggatgaagtagtaaaagtagcaagagaactgaaagaactgggcgtagaaaaggtttataccggacattgtaccggaatgatcgcatttggaattatgaaaagagaacttgggaatatggtacatgccctgaatacgggatgcaggatagagatttagtatgaattggaaagcagttgtaggtgtaagtatgctgtgcattactatgatgatcaggtgtgaagagaagaaaacacatagttcaagaagtaatgagacagtaaaagagaaggtagaaatgcagtgacctgtggagaatatgactataatatgcagaattatttatggagaaaaagggttaagctcgttgccaatacaggatattgcaggggagcatatagatacagataatgagtacatgtattactattcggttgaatttataaaatagcactaataaaaagaagaggatgtcacgtaatctgctttgattcgttggcatccttttttgacatttagtttttatgacattatggatttcataacctatttcttatttttcggtattctctcggcgaatatcctttcagcttgtgaaaaagccggctgaaataaagctggttatcatatccgacaatcttagaaatctcattgatggaataagttgttgtttcaagtaacatctgagcattgttgatgcggattcccacaatgaattgcattggtgtagaaccggtatattttttgaaatttcggataaaccagctgacactcatgcctcgtgaggcagcataatcatcaatattaatattttgattgtagttttcactgaaaaaggtaacagcattattcatctcatgatcaaggtattcattttttaatatgtgctctcttgtcagttcccggtggaaactgatcagaagatgacgtagcaaaaggacaagcatttcctcataattatcttgacagcgttggagctcgataatgatacgtttgaaaatttgttcatattcattagatgtaccaacttgaaaaacatgttctttatctggaaacccatattgacgtaagatattttttacattgcttcctgtgaagtgaatccagtatacttctgtcttatcttctccgtaatattcatatttttggagttctttcggtctgtacagtacaatgttgccggctggaacaatcgtttcattatttacattatcaaaatgaaaatgcccacaaccagcagtgatatatataatctgataatccagacgaccccttggacggtaggtcggaagtttgggatgtctggaaaggcggtaagtaccacagctaccgacaatcagcggacgacttttgtctttgaaatccatatgtgagtggttcaaataaccggtgttcaaatacataggacagcacctcttttcgtactttttatcattgtatcatttagtgcatattttgtctaatccaattcatagacatattttgcgaattaggataagctatatagcataactaaggaacgtaaacaaaaagtaaagtataaggtttgctttagaaaaacaaagaacaaaaaagtatatgtattggaggagagctatttatgatcgtaccacgttattatgaaaatctaagcgtactgcacgaaaacacaatgccagccagagcctattatattccggcatccagaagaatggataacttggtggaacacagagaagagtcagatcgtatgcagttattgaatggaacttggaaattccagtattttaacagcatctatgacattcaggattctttctttgagaagaattatgatacagaaaattttgatgagattcaggttccaagtgtatggcagatggctggatatgatacacaccagtatacaaacatccggtatccatttccgtttgatccaccatatgtgccacaggacattccgtgtggagcctatgtacatacttttgagtacagtagagatgagaaagcaccaaaatcttttttgaactttgaaggagtagacagttgcttttacgtatggatcaatggctcttacataggatacagccaggtttcgcatatgaccagtgagtttgatgttaccgatgtacttcaggatggaacgaatacggtggcagtgttggtaatgaagtggtgtgatggttcctatttggaagatcaggacaaattccgtatgagtggtattttccgggatgtgtacattttgaaacgcccaaaacaggcgatcagtgattatcatattaaaacaagaattgaggatatgcttgcgaaagtagaaattgaaatgaaattctactctccgttaaatgtaaaaatttcgattgaagatagaaacggagcagttgtagcactaggaagtattgctgaagaaggaacagctgtattagaagtcgcaagtccggaactttggaatacagaaaatccatacctatataaactgattcttgaaacagagaatgaagtaattgtagatcacattgcattaagaaagatagagattaaagaccaggttatttatttaaatggacagaagattaaattccgtggtgtcaatcgacatgattctgatccggttactggatttacaatcaattcggaacagattacaaccgatcttacgttaatgaagcagcataattttaatgcgatccgttccagccactatccgaacgcaccatttttctatgaaatgtgtgacaagtatggattcatggtaatagatgaagcagatattgaagctcatggtccatttatgatctacagaaaagaagacaccgattacaatcggttcaaacgatggaatgagaagattgcagatgatccggtatgggaagaggcaatcgttgatcgagtaaaactcatggtggaacgtgacaaaaaccgtttctgtattgttatgtggtcaatgggaaatgagagtgcttatggctgcaactttgaaaaagcactggaatggacaaagaattttgatccagaccgcatcacacaatatgagagtgcaagataccgtaattatgatgaaacatatgattacagcaatctggatgtgtacagccggatgtatccagcgctttccgaaattcaggaatatctggataaagatggaagcaaacccttccttttggtagagtactgtcacagcatgggaaacggacctggagattttgaagattacttccagatgattcaggataatgataaaatgtgcggcggctttgtctgggaatggtgtgaccatgcgattgctcatggaactgctgagaatggaaagactatatatgcttatgggggcgaccatggcgaagaaattcatgatggcaacttctgtatggatggattagtatatccggacagaacggtacatacaggacttttggaatacaagaatgtttatcgcccggcaagggttatttcctatgacaaagaaagcggagaactggtgcttcataactacatggattttgataatctgaaagattatgtgaaaatcagctatgaattgacacaggatggacttttgattgggaaaggaaaacttgctgaagtatctgtggtaccacatagtgaaggaaaaacaaacctgcaggtcaacgttccagaaaatggaaaatgttatttaaaactcacttaccacctgaaaaaagaaatgcctctgctggaagaggattatatccttggatttgatgagatcgaagtgagccagaaggatgccaaatgccagttagcagaaaaatgggttgaaaaaacagtgacggattctgaattacaggtgagtgaagatgatacccagattcatatcaaaggtcgtgaattcgcatatacaatcgaccgacggactgcactttttacagagatgaaatttgcaggtcgggaatatctgaaccacccgatggaattaaatatctggagggcaccaacagataatgatatgtacatcaagtctgaatggaagaaagcccattatgataaagctcatacaagagcttacacgacagaggtcgtgcagggaaagcatggtgtgaaaattacaagccatgcatccgttgtggcagagacagtacagaagattcttgatgtgacgattacatggaaaatagaagctgctggaaagattgatgcagatattgcagtaacaaaagacgatgaattcccggatcttccgagatttggtgtgaggatgttcctggataaaaaactttcagctgtaagatactttggaatgggaccacaggaaagttattgtgataaacatcaggctgcgagccacggtttgtaccgggcagatgtaggggatttacatgaggactatatccgcccacaggaaaatggaagccattatgattgtgaatatgtagagcttaacaacagccgatatggaattgtggcatccgcagaaaaggcattttcattcaatgcttcttattatacacaggaagaacttgagaagaaaacgcataattatgaattaatagaatcagatagtgtagtattctgtgttgactacgcattaaatggcattggttctaatagttgtggtccagttgtattggagcagtaccgatttgatgatgtattattccggtttcagtttacactgataccgtatgtaaagggataataaagtttcatgtaacccgtaaacaaggaaagagagtctgattgtaatgtaaagtccggatatacagagcaatcagagaaaaaaacagaattagatatcatacggttagccatattgagattctaagtgcgatgaagatgaggagcaaagaaattcgatggaagaaaaaaagtatttgaaatggtataacaaaattggatacggatcaggtgatattgcaggtaatgtagtctatgcgttcctgacatcttttataatggtctatctgacggactcggtaggacttgctgcaggcgtcgtgggtaccctgattgccgtatcaaaactatttgatggttttacggatatattttttggatcaatgattgacaaaacacacagtaaaatgggaaaagcgaaaccctggatgctatacggatatattggttgtgccattacgctggtcagctgctttgcagtaccggtgagtttgggaacaacggctaaatatgcatggttctttatctcttacacactgttaaatggtgtgttttatacagcaaacaatattgcttattcagcacttacgtcactgattacaaagaacagcaaagagcgtgtgcagatgggatcttaccgttttatttttgcgttttcaacaagtcttctgattcaggcaattacagttggatttgtagataaatgtggtggagatgctgcagcatggagaacggttgctattatctatgcaatcattggtcttgtcgtaaatacgatttcagcactttctgttaaggaacttcctgaggaagaatttaacgaaggagaagtaaaggatgataatgaaaagtacggaatggtacaggcattcaagcttcttgttaaaaacaaatattacatgatgatttgtggaacatatattttacagcagttatatggtgccatgattggagctggcatttattacatgacatgggtactgaaaaataagaatttgtttggacaatttgcatgggcagtaaatattccactgatcattgccctgattttcacaccgacattagttggtaagtggaaaggtatgtataaactgaacttaagaggttatgtcttagcagtcatcggtagagcacttgttgttgttgcaggatatatgggcagtgttccgctgatgatggcatttacagctcttgcagccttaggtcagggaccatggcagggagatatgaatgcagttatcgcatcctgctctgagtacacttatcttacacagggaaagagaattgacggaacgatgtactcttgtacttctcttggcgtaaaaattggtggaggtattggaaccgctgttgttggatggctgcttgagttcagtggatatatcggaacaaatgcaactcagccgcagtctgcacttgatatgatgcagtttatgtatctttggcttccgttaatctttgatgtattgattatgtttgtactttcaagaatgaatgtagaagatgcaaataaaaaactgaaagcagaaaaaggaattgctgcagatgaagtaacagatgcatcagacataaattagaattgacaggagaaagcgttgtctggtcattgctcgatgagacagtgcttttttctatatataaagtgattgaactgtattttgaaaataaaaaaggaccacttcatttttgtgaaatggccttaagaaaatattcagttttcacaaaatagtccttttagtatttatacatggtaaggatgctcaaaatattcagtgtagaatactaaaaggtcattcagatatttttttaggttgctcatttgcaattcctcctttccttatttacaagttgattataagataggtgtaaaaggattgcttgccaaatcgaaagaagatatagacaaatgttgcagaggggagtatttcatgcagttaaaatatgttgacacaaaagaggagatcatagcaataaataggaagtcaaaacatattgaaccacatcttcataatgcactggagatcgtttgtgtaacaagtggagcattagaacttggtgtcggacaggaactataccatatggaaaaaggagatataggctttgtatttccagatgttattcatcactatcaggtactgacacccggtgtaaataaagcgacttatctgattgcatcgccatttacgatagccaaatttgcagatatcatgcaatccatggctcctgaataccccatcatcaaagcggaaaaggttgaaccggaggtatatagggttataaatgcaattttagagacagaacagtcggatattactgttgcacaggcatatcttcaaattgtgttggcacgctgcataggaaaattaaatttggtagaaaagagtaatgtggggagcaacgatcgtatttaccagacagtttcctatatatcagcaaattttaagaagaaattttcgctggaagagatggcaaaagatctgggggtgagcaaatatgttttatccagactcttttccaaaacattccatagaaactttaatcaatatcttaacgatgcaaggctgaactatgcatgccatcgtttggaaaatacgagtgattctattacaaatatttgtctggatagtggatttgaaagtcagagaacatttaaccgagtatttaaagaaagatataaaatatcaccgagtgattatcggagtatttgtgtgaaagagatgttgtcataaaaggttctgttgatagaaatatttactttgatttcacagtactatgtatttgattttatgtgtggatgatataatataaaaatatttgtagaaaatagcgctttattttattatgaaaagagcaaggtgtattctaaagaaacaagaaaggcagggcgcatatgaacatgagaaaatccataatcgattttaatgaaaaaaaggattcatctgtgatatggatggtgtgatttatcatggcaatcagatattgccaggtgttccagaattcatccagtggttgcatgatgaaaagaaagaatatttaggggctaatggaaaattaaatgttgaatatccgaatggcgttgaagtgtagaaagaaaaatgagaggtttcgcatttattggaacatgccaaggaaatcatatcagtagatatctatggagatacgcaggaaatcatagaagactgtctggatatattggaaccatttattgaagaagttattccaaaagagcggaaagatcagtattatgattattcagaagtgattgaaatagacttaatcctggaggaatatttcaacgcagcatgataaaaaatagaatagtagtaagagagaaaagtacaaataagaatcgaacatttgtacttttttcttaccttcatctatatactttcaaaaaaatgtctgatataatagggactgttacaagaacaaacagtaaaaatatgacagaaccggagcctggtatcatcaggtatttccgagtgctgttttatccgcaaaaatcagttttgtgacttttattcgtaacgaggtgaaaaggacatctattcaccataaaataagcttttcgttacgaatctggatacgaatttttggctgatattgatcatagtaaaagtcacaaatggagggatttaccatgaatgagttcaaattaaaagccccatataagccaaccggagaccagccacaggcgattgcagagcttgtgaaagggttcaaggaaggcaatcaatgccagactttactaggggttacgggttctggaaaaacttttacgatggcaaatgtgattcagcaattacagaagccgacacttgtcatcgctcataataagacgttagcggctcagttatacggagagttcaaggagatgttccccgataacgcggtggaatattttgtctcctagtagacggaggtcgaaaaacaggtggtattttgtggtatgtgggtggttgaacatccagatgttgtggaagtggtagtggtgagagtataagtgaaaagcgggtggatgaagagggtttgtgactttttgttgcctgcttttttgattatagaatttgaaaaaagcagtgtatagaggttgaagtgctggtataattgatgtggaaaaggggatagatttatgtattataaaaaagaaaaaaggaaagagatagatttatgtaatatatgtggaaaatctaaaagattaacatgggatcatgtaccgcctaaatgttgtaataatcgttatgcaataaaaactaattcttggatggaaggtattccagaagaatcaagttatgcgaaaaaatatcagaatggaattaaattcagatcattgtgtgatgaatgtaataataaggtattgggagcaaattacgataaggtattggaggaatttgcaaatcaattagcaataattatgcaaacatcaattgctttaccaccagttgtgaaggtaccaattaaaattaatagattatgtagagcaatttgtgggcatatgttagcagcaaaaaatttttatgaaaatgaatgtttaatagataaagaattaagagagtatgtacttgatgaaacgaaacttccgccgaaaaaaatgtccttgttatattggatttatccatattctacgatagctataatgcgagacatatgtgtttatccaagtcataataaatataaatttccaaaaggactaattagcataatgaattcgttcccagcagcatatataattgctgatgatgaagaaagatgtggattatttgatttgttcagtgtatgtagtaatgatatagacgaaacagttgaaatacctgttgattgcagtagctgttatttcccaggaacaaaacatttacgtccgcttgcatggccttgtaatatatcggatgaggaagatggggcttcatttatgctgggggtagataaatgtatgaatgattctaagattgcaaagcattcaaatgataatattgaaaaaattagaaataggagaaagtagaaaattatgaataatagtttttgtatgatacatgaattagaaggataagagaatctttcagatgagtatgcagaggatttaggtttattaaacaaaagaataagaagagatttttagacatataaaacagaagcaaagttagcagtaatattagcaaatttaaatgaacgcataatcttacagttcgcataagaatttgaaccgtattattatcatgtaaatcaacgaaaaaccttgaatttcctatgaagatgggagaattcaaggtttttttgcgtgttggggaatgacttttgaattattgaaaatcatcgctcatattacaccgaattgggtaaaaattggggagtgagttgggggatttcaattccccaactggagtgtgaaacttctcctcattcttctggaataaatgggcagagattacttgttttattttgttggggagtagtgtaactccccaactgttggtgtgtggtagcgtgatgtttttcaacttttcataagttgttatggaaatatcttccgattgatgaattaataaaagtgagatataattaagaaaattatatataaaatcagataggaattaggactgtatgaaggtttttaaagaaacaggatatatggagcaatctgcacattttggttggcagaacaaagattcagcattgtatggattgagagaaggatataaaaatagtgcagatactttggtagagtatgtattagaacatggagaaaatcctaagatattggatacatatgtgtttccaattttgttttcatatagacattgtattgaaatatcattaaaacacatttatcgaagagctctaggaaaaatgccacctggaggccataatttgttgattttgtgggaaaatgttaagaatgaaattatagaccaaatgatatgctcggaagagtttttagagcatgtcaaaggatataaagaaaattatattcattattctcttgaaggcataaaattaacagaaataaaagcaatgttaaaggagatacaagaggctaatcaacgaattgaagaaataaatcctagtaataaacaaattgatcaaaatgcagaagtatggcgatatttaatcagtacagatgaaaacttatttttttcatgtggacattctattgattatcttgtattaaaagaaagcatgaatcatatttatgagattttagattatttgtattatattgtagatgaatatttatcatcataaaaaggaggcatataagacagatgaaagaaatatttagttataatgtagatgtgaataagactgcatatatgaattggcgaacgaagtatcatgagcaaatacataatatgattgttattgcagatggttttatgaagtctgcaatattacttgcagaaacagcacttgacgataatctggataagaaagcagatattatcgtctatccgatgctatttaatgcaaatcatgctatagaattatatttgaaagcaattacttggacattgaatattgtattggacaaaacagaaagaattgaaggtagccataatattcaacagatacttcaagttgtaaaaagtagggtgacagaatttgaaacatctcgtgaaaagcgagagcagtttcgaaaaatgattagtaatctagaggaatacataaatgaacttttttcaaagatatcttcagaagatacaaagtgtaaaaaggataatatggatttttcaagatatccgtttgatcaaaagtatgtacctcatttttatatttcagaatttgataatgttgttgtagatttagaaaattttgttgagcgttttaaggatattggcaaaaatttaaatttactttcgacatattatttatatgatattttagaagcaggagaataatttataaatatacatagccgattgattcaaattacgagtcagtcggttttttcatgcccatttttatacatagccagtctcgtaaaaaggattggctattaaattttttcgaggaaggaggaaaccatatgaccaaatgtaaagtaatcgcctttgcaaatcagaagggaggaacagcgaagaccacaacgacattaaatcttggaattggtcttgcacatcaggggcgaaaagtattattggttgatgctgatccacagggagacttaacaaccgcattagggtggactgatgcagataatcttccgattacattggatacgcaaatgaagaaaatattacaagacgaaccgtttgtgtataatgaaggtattttacaccatgaagaaggagtagacattattccgaccaacattgagttatcgggtatggaaatctcactggtaaatgccatgagcagagaacagactttaaagctgtatctggcagatttgaaaaaggattatgattatatcctgattgattgtatgcctagtttgggaatgttgaccatcaatgcattagctgccgcagacagtgtaattgttccggtgcaggctcattatcttccactaaagggcatgacacagttaatgaaaacaatcggtaaggtacagagacagctaaatcctaatctgaagattgatggagtattgctgacacttgcggatatgagaacaaaacttgcaaggacaacagaggatagccttcgagaaaattatgggaaacatattcgaatttttaaaacggttattccagtggctatcacagcggcagaaagcagtgcagcaggacagagcatttatgagtatgacaagaatggaactgttgcaaaggcgtatgcagaatttacgagggaggtgattcaatgtggcgaaaagcagagaaataaacatgaatcttccttcagtagatgacctttttacgacgcaggaagaaagagaccagaagaatcaggaatatgtaaaagatatttcgatttatgaaattacagatttcccgaatcatccgtttaaggtaaaaatggatgataagatgttggaaactatcgaaagcgtgcgtgaccatggcgtattagtcccagcacttgtcagggaaaagccaacaggcgggtatgaaatgatttctggacaccgcagaaaaatggcaagtgaactggctggaaaagagacaatgccatgcattgtaagaaatcttagtgatgaccaagcagtcattgtcatggttgacagcaatcttcagcgagaagaaatcttaccatccgaaaaggcatttgcttataaaatgaagctagatgctatgaagagacagggacagaggagagatttgacttctgtgccactggcacagaagtttaaaggtaaaacttcaagagaaatattaggtgaacaagttggagaaagccaagaccaaatccgccgctatatccgtcttacagaacttatcccggaaatccttgaaatggtcgatgacaaaaagatttctatgcgtccggcggtggagttgtcatatttgccgaaagaggaacaggagatattgtacgatatcatggagtcggaggcttgtaccccaagtcatgcacaggcaatcaaaattcgcaaattttcagcagaaagcagattaaatgaagatgttttactgttgattatgtcagaagagaagccaaatcaagtagagcagtggaaaatcccgaagaatcggctgaaaaaatactttccatcgggaacttcacagcagaaaatggaagaaaccattatcaaagcattggaattataccggaaacgagaaaaaagtagggaacgataggcattttgacgccaagggagaagtctatccgttggtggtcaatgagaaatcagttttttcctgttttcccctccccacaccctacccctttggtttaccagcagattaccagccgaaaagacaataaggagccgggaacattttctctttcggcaggtcagagattcccacaccctgcatgacagcagggaataaacagcacaaagcaacaacaggcgttccagacggacgtcttttttattggattgaaaagaaaggaattgtagaaaatgaagaagatatggaaacgagtgtgtacggggcttcttgctctgaccaccattttaactgcattaccgactacatcggcttacgcagcagaaacacagtattggacagagtcctcagagagagtcggatatattgaacatgtgatgaatgatggaaccattcattcgacattcaatgaaggtcacatgaaagtagagggcgaaacagcctattgtgtagatattaacaccggatttaaaaatggatataaaaccagacacgatgcaaataccagtatgagtgctgcacagatcgaagatgtggcattgtcactggaatatgtaaagcagtataggagcagtcacagtaacctgaatgcgaatcagggatatctgttggaacagtgtgtggtatggcagagactgagtgagtatttaggctggcagtgtgataatgtccgagctgcatattctgagatttcacaggatattcagaatgaagtgtatacaggagcgagagtatttgtacaggcaaacaaaggtcgttataaatgtggcggatatatctatactggagagggacaggatctcggacagttttgggcagaactgaatgtcggaaatgcgaaggtaaaaaagatcacagcaaatgaaagtatcacaaaagcaaatgcaatgtattccattgcaggagcaacttttggcatattctcagaccagaattgcagtaatcagattggaacacttacaacaaatgagaatggtgagacaaatgaagttgaagtgactgcagggactgtttatatcaaagaactttctgcaccgaagggatataagctggatacgacagtacacagtctgaaagttgaagctggaaaaacagctacattaaatgtttccgatgttccgaaagtgacagagacattggtagacctgttcaagattgatatggagacaggaaaagcaaccgcacagggaaatgcagcactggcaggagcagagtttacctggcattattatgatggactttatacaaaagacaatttaccagagaaagcaacacgcacttggattacgaaaacggtggcagaaaagagcagtgacggaagtattcattatgtgacaaaactgacagatgcctacaaagtatcaggagatgcattttacactcagaatgaaaaaagcgtattaccacttggaacactgactgttgaggaaacaaaagcaccggacggatatttactggacggagcttatatgcaggcaggggacagtacagagcagatcaaaggaatgtatctgacacagatcacagaggacggagaacttgcagttctttccggaagcaaccagtattccgtatctgatcaggtaatccgaggtggtgtgaagattcagaaacgtgatatggagacaaaagacactaaggcacagggaagtgccacattaaaagatgcagcatttgcaattatttctctgaacgagaatccggttctggtagaaggaaaactgtacaagaaaaatgagacagttaagacaattcagacagaaattgacggagtagcaacaacatcggcagatttacttccatatggtaaatacaaactggaagaaaccaaagcaccggaaggttatctgactgacggggcaaaagcgattgaattttcgattacggaaaatggaaaaatcgtagatttaacatgcgaaagccattccatttacaaccagattaaacgtggagatttagaaggagtaaagattggagcaggtacacataagaggcttgcgaatgttccttttaagattacaagcaaaacaactggtgagagccatatcgtagtgacagacaagaatggtcagttttcaactgcttctgattgggcgtctcataagaaaaatacaaatgcagggaaatccagtgaggacggtatctggttcggaacatcagagccagacgacagcaaaggggcattactttatgacacttatgagattgaggagttatcttgtgaatccaacaaaggtatgaagctgattccggcatttgaagttgttgtcagcagaaataaagtaaccatcgaccttgggacattgaccgatgagtatgaaaaagagattagcattcatacaaccgcaacagacaagaaaacgggcgaaaaggtaattgttgcaggaaagaaagtaacgattgtggatacagttactctggacggtctggaagaaggcagaaagtaccagttaaaaggctggcagatgctgaaagaggaaaatgcagaactgctcattgatggaaagcgtgtggagagtgattacacttttgttgctgacagcgagaaaatgaaagtagagatttcttatacgtttgatgcatcagaacttggcggacagaatctggttacatttgaagaattatacgatctgaagaatccggaagaacctgtaaaagttgcagagcataaggacactgacgatgaaggtcagacagtcctgattacagagcgaaagatttcgattcataccacagcaacggataagaacggtaagaaagaaatcgaagccggaaaagatctgacgattgtggatacagttacattagaaggattggaaatcggtacaaagtataaattgtctggttggcagatgattaaggaagaaaatgcaaagctgatcattgatggcaaagaagttaccaatgattatgaatttacagcggacaaggaaaacatggaagtgcagattgagtttactttcgacggcaacactcttggaggaaagcagcttgtaacctttgaagaactgtatgatatgacaaatccggaagaaccgaaaaaggtaacagagcataaggacatcaacgatgaaggccagactgtaaccatcaaagaagtaccggaaacaccaaccccagagacaccgggtactactacaaagacaagtaacactccgaaaacaggagacactggaaatgcagttttatggatagccattctggtattatcagcagccggaatcacgggagttcgtatctggaataaaaagaaacaggttaagagattaggaattgaagaaaagaaagaagaggaggaataaaacagagggcggcgataagctgccctttgatattgaaatgggaaagaatcagaaagcaataaaagtattacagcgtttatttgatgccggatacggaacggagaaagagatcgtcaatatgacgatggatgagatgcttgctttgccgggagtgaatgtagcagatttgtgtattatcagtgagttacagaaaagaattaagacaaacaaagtgataagctatttgtcaggaaaaacagaagcaagggaagaaacgaaaggagcagattatggtggaacaacctaaatatttggaaatgacattatcacaattgaaatcatatgtggaatcttcagatagtaatgtccttctggttgtagaatttccaaaaggagatcagaacaatggagaatgaattggaagttgtgaatatccgtctggtaagagaaccatctctttatagtgagcagatattggatagtccacaggctgttgtagaattgatggcgaaggagttatcccaatatgacagagaagtattttgtatcctgaatatgaaaaataatggacaggtaatcaatatgaatctggtcagtgttggaacaatcaatgcatctttggtaattcccagagaagtttttaagagcagtattctggcaaatgcttctgcaatcattggacttcataatcatcccagtggcaatgtgaaaccgtcaaaagaggatatgattgttacgagaaagctgcagaagtgcggacagctactggggatagaattgctggatcatatcattgtcggtggaactaatggaaagatgctcagcttccgagaagaaaagatgttgaatgtgacaggaaggatggattgggagagatagaagaaaaaagaattagaagtttttatttattgtaatatttcatgtagcggcattagtaaaatagtgtcgctacaaaaagctgacttatacattgatattatatgcataactcaaaataaaattgttaaaaatagaaaaagaaacaatatataacgaaaaaatctctaaataagagaatttacattgactgagagaagagtaaaacatataataaaggtggaggtgtataagaatgttagtaaaagtaagtgttgaaaattttaaatcttttgataaagcagcagagctgacaatgatttcctcaaataaaatacgaacaaatgcaaatcacaggttaaagataaaaagtacccagttattaaaatatgcagtagtttatggagcaaatgcatctggaaagaccaatctggcattgttctttaaattttttaaagatagtgtctgcaatggtattccgatagaagctacacagatgttttgtaagaatcggaaggagaataaggaacgagaaagtagttttgaaattcagattactgtaggtgacaaattttatgcctatggtttttccgcagttttaagcagacgaaaagtaaccggagaatggttatatgaattatatcagaatggttcagcaaaatgtctctttgaacgagaaggaagcaaacgtccggtgttaaatgatggtattacgctgataaacacagaaaaaaataaatttgaaacctatgcagatgattttgaaggaaatgaaacatctttgttcctgacagaaatgaatcgtggaaaaaaatatagcacacgatctaaattattgttcttccgggatgtatatgattggattcagaatcatatttcgattatcacaccggatacgccattgattgatttggaatattattatgatgataattcgctgaagctgattaacaaattgatcaaaacatttgatacgggtatcagccaggtaaaaattgaagaaattacattggatgagttatcaaatgcattgccgaaatcagtatttgataagatgatgcagcatgtaaaaaatagaatggaagagcaggaagaaccatcattcagaatgacaatgaggtcgaaggaaactttctttaatatcgaagttgaaggacattctgaaccgaaggtcacaacaatccgattgcatcataataagtcattttatgagttcggttttgatgaagagtctgatggaacaagaagattattcgatttgatggatatgctgttgaataaacgagaagatgttctttatgttgtggatgaattggagagaagcttacatccgaaattgacagaacgatttttgcaattgtttatgcagctacatgatgagcagcgtatgcagctattgttcactacacatgaatcatctattatggatcaggctatttttagaagggatgaaatctggtttgtagaacgtaacgcagaaaatgcaagctctatttattccttagatcgtttcaaggagagatacgataaagtgttgagcaaggcatatctggaaggcaggtatggtgcgataccagtattttcaacatttgactttagagaggaggagtagccttggctccagtaagaagttatacgaattggaatagtagaactacagatgaagaagaacagattgagccttatcgtaagtactttttcatatgtgagggtgcaaatactgaaacatggtatttcaaaaagttaattgatatccgaaaagagttaaatattcatccattgatcgatatccggttacttgaaaaaacagagggagacagggacatttcatttccaagacgtttgattgagtttgcagaaaatcagaaagaaaatccagaaatagcgtttgataaagaacgggataagatgattgttgtatttgatggagacatttttgaagagaaggtacttgattatgatgaattggtagcagaaggtgaaaagaataatatattagcggtcagcaatccggcatttgaattgttcctgctgttgcattatgaaaactcatacgaagatgacattgagccaaatgctgaacagattatccagaatgaaaaagatggacatcagacatttatctataagttgttacttgccagaacaggaatcaatccaaagaagaattcctcaattggagaactggcgaagaatatagagattgctattgaacaggaaaagaaaatcaatgaagatattcatcagtgtaaaggacagattacgtgtaatataggtcggattattgatgagattcggaaagatgatggaaaataaatatggataaagcggagaagtgtttagaaagaagaaacaataaaagaaaaatatattacaggacagaaaaaggttataatcttgtgaaccaagcccaagaaatgatcacaagagaacgatgtgtagtattggatgaaaagcagatcttaattccaggatgcgaaatttggtttacagatggtgaagtgattgatgcatttgcaactaaagaaaatgaaacgtactatatgttcataaataaagccattatagaagaacaaaaagagtatttagaaaaattaaattggaaatttttaattgattcgggaataaaagaagaatatatagattcacttatagaatatggactatattttgttatctttcatgaatacgctcatattttatgtggacatgtcgaagctaatttggaagatcatgaggataagaaagcagaagagtgtgaagcagacatgttttccatggattatcttattaattttttgcttcatacaaaagaatcaattgaatggagttcggagattgaaaaattatttttagcaatttattttatgatggaaaattcccaagcaaatgaatatcgagaattctataatgataaattaattcaaaactattatgatccagaaagaattgagaaaagagatcatccgttaaatgcacaaagaataatttatttatatgaaatgttaaatattctaattgtagatgagaaagttcaattattgccaattagagagggtataattaataaattaaaaattgtaaaaaacataagtgagaacagagattccaatgttaaaaattacaatgtaattaatgattctattagacagttgaaacagagtttgattaatattcgaaaaaaaatcccgcgattaacggattgattttttgcgaatagatttaaaagttgaaacgaataggaaaagcatacatagccagttggttccaactcaaggaatcacctggctattttcatgcctgggtattatcccgaataatatcaatctaaggcaagaaaggagatgaaaattatgccatatataccaccatcggtcgtgcgggaggtcaagcggatggatttgctcacgtacttgaaaaattatgaaccatacgaattggttcacttttctggtaacacctacactaccagaacacacgacagtttgaaaatatcaaatgggaaatggatgtggtggagccagagaaccggtggcagatcagcactggattatctgatcaaagtaaaaggatacagttttttagaggcggttgaattgcttgcagaaaaggcaaatattcaaccgcctatttctgtatctgagaatgttccgatggagaaacagttactgttgccaaagaaaaatcaagatgatcagaaagtgattgcgtatcttttaggacgtgggattgataaggaaattattcagttttgtttagagtccggaagagtttatgaaagtgcatttcatcataacgtagtgtttgtagggatggatgagaaagataatccgaaatatgcagctcttagaggaatcggaaccagctttataggagaagcaaatggaagcgataagaattattctttttccatttttgcagagaaatccaatgatacggtgcatctgtttgagtcagccattgatttattatcctatgcgacgttgcagaaattagacgggaaagagtggaggagagaacatttattgtcactggcaggtgtctatcagccagcaaaagaaattgaaaaaagtaaagtccctgcagcgttggccaggacattaaaaatgcatccagaggtgaagacaatcgttctgcatttggataatgaccgtattggaagacttgccacaaaagcaatttctacagtacttccgaagcaatatcagataaaagatgtaccaccaaaacaaggaaaagattacaacgatctgctctgcatcaagttaaatctggcaattacaaagagagaaaaaagcatgaaaaagaatatgtctggtcatgaaaaatatgagagatagaaggtgaaaaaagatatgaaaattgcaagatatgagctgaaggttgtgtataagaaagaactgattttgatgatggaagacgatgtagacagcgaagatttgttgaagattttttgggaaacacagttgaaagaggaaaaagaacagagtgaattacttggaattattgctgaaaaaatgtcagaagaaagctgtacggagcagtgtgaaagttgtcaaaagtattgtccggcaagtgaagaatgtatggaaactgatgaaaatgtacgatgcacaaagtgtgaatacttgtgtgaaacttgcgggatttgtgaattgaaagaataaaaaaagcaagtgctttttcggcaagtaaatcttctgatacccggaacagtgagacgggtgcagaagaatacacaataccagcaagcaacgcctttggattgccacacaggtttcctgtctggcagtctgcggcagcttgtcagggagaatccctgaaaccctcagaaaatgaaaaaggagaaagtaacaatgttgaagtttatttgtggagtattagtaggtggcattataggagtagtgttgatgtgcttgttgcagattaacaagattcggtagacaaaaagaaaggagatacaagatgcaggttgaagtatcaatgaaagacaagaagaaagcagaaagacggtatcaggaatatttaaagaaaatgaacaagaagaagggagaacagaagaaatgattgtaaaagagatgatagcagaaaaggtatttgcggaaggtgtagcaaaagacattcggaattttctcccagctaaatatgagaatgcagaatttcaggtaatgcagatgaataaaaataatggagtccagatggtaggagtacaggtaagactacaggaagaaaatgtgtgtccagttgtttatgtagagccgtttttcaatgaaatacgtctgggtgaacctgttgagaaagtgatgaatgaaattgcaaaatgcatggaagaagcaggcaatgctccgtttgtgcacaacggtatcaacccaatggattatgattcagtgaaggaacatctggcagtgatgcttgtaaacacccaggcaaacaaacgaatgttacaggaaatgcctcatgaaaatatcgaagatctgtcggctatctgttatgtggattttccggtagagtctaacgatggaaaagcgactatgaaggtgaaaaatgaacatcttaagatgtggaatgtggatgcaaaagaaatgttccatcaggccagagcaaatacccagcctgtaaatacaccgattcttcagtcaatggacgaaatgatgttgagtatttttaatgaagaaggacatgcaacaaatttattagatgaaaatgttgattttggatttcgttcacatgatatgttgtatgcacttacgaatgtagaaaagcaatatggggcatctatgatcacgcagccagaagttttaaataaattggaacagctttttccagaaggattttatgtgttaccgtcatctgtgcatgaagttctgatcgttccggataatggagagatggaaccgaaaatgcttggtgaaatggtacgggaagtaaataaaaatgaagtggaacggcaggaagtcctttcagacagagtttacagctacgataaagaaaaacaccagattcgccaggaaccagattctatacagaaagtaaaggagatggagcgttgagaaaacgtaatgtagcaatcctttttcgattgaacaaaaaagaagcagaggtattggataagaaagtaaagaaaagtggactgaaccgggaagcttacctgagacagttgatttccggtgttgttccaagagacgcaccgccaccagattattattccatgatgcgggaacttcataagattggaaataacttaaatcagattgcacagaaagcacatgtgttaaatgtgatagatgtgcagcgttacgatcaggaagtgtggaagttcaatgaagcggtccgtaagattacagaagcagtaatacttccggagaaaaacgaatcatggcagtgacatcaatctggagcatcaaaggttggattggaaaagtaatcaattatgcggaaaatccagataagaccaaagaacagacgagccaagaactgatttcagaaagtgaaaccgggcaattacaaggacttaatgatgtgattacctatgcggtgaatgcagaaaagaccagactgagacaatctaaatcaatggaaatggaagttgtcggagaatcggaagaactgatggaacagtatgtatcgggacttaattgtgcaccgacaaccgccagagaagaaatgattgcagtcaaaaagcgttttggaaaggaggacggaattgttgcgtttcatggctaccagtcttttgcaccgggagaatgtaatccggcaatggcacatgagattggaaagaagctggcagaagaattgtggggcagtcagtatcaggtattgattgcgactcatttggataaggcgaatcatctgcacaaccattttgtggtgaactcagtttcattcattgatgggaaaagataccacaggacaaatcaggattaccgggatatgcggatggtgtcagaccgtttatgtaaagaataccagttatcggttgtgaggcagccagaacagggaaaaggaaaacattatgccgagtggcaggcagaacaggatgggaagccgagttatcacagcatggtaaaggcagatgttgacgaggcaatccgaaaggcgaggactgaaaaacagttctttttttatttgcgggaaaaaggatattcttttaagtttgggaaagacattaccattcgtccggaagggcgggagcgtggtctgaagttaaagcggaattttggagagaattattcactggaagcaatcagggttcggactctggaagaaaatgaattacctgccgagaagaaatttccggttcagaggcattaccggattagggtatccggcaacttcaagcagacaagaaaaatcggaggacttcggggattgtatctgcattactgttatcttttaggaatcctaccgaagaatcgcccgtcaatatctgctaaacaggtgcatgtattgttccgggaggatttattaaaactgaataccgtttctaaagaaacgaagctgctttgccattatcacattgatactgcggagcagcttttttcattgaaagaccatttacagaaacaaatggagcagtgtgcggaggaacggaagcacttgcgttataagattcgggcagacagaccggaagaagaaatacaggaaatgaaggagcagataaaagttctgacagagaaaattggaacgctcagaaaggaggcagcactttgtgatggaatcgccgcacgttccaaggtaatcgaagaaaaatttaagatggtgcgggaagaaaaagagcagaaggaggaacaaaggcatgaacacatcaggcgaagccgctgatcaggtggtacgaatgtcattggaagtcggtgaagcagcattgaagatcagtggcacaggagcgaagcatctggcagtgatgctgtatgcagtcttaaaagagaagaaaaagacaaaaggcagagtaagacttgaaacattggttaaatcaggtagaccactgacggtattttcagtgaaagaaagtgatctgaaacaatttgttcaggaagcaaaacgatatggcgtgttgtactgtgcagtccgaaatccaagaggaagcagtgacggattgatagatgtgattgtaaaggaagaagatgcaccaagaatcaaccgtatcgtagatagattccagtttgcatctgtaacagaagcagcgaagattaagacggaaattgagcggacacgtgcagaaaaagcaaaagccggaaaatcagagaagcaggaaaagaagccggaaaaagtacaggttcagcaagaaaaacagggacaggcagagccggaaaaagattatccgcagaaatccaaggaggatcagcttatggacgagttgtttggagagtcggtgaagaaagagggtaaggagcaaaacccttctttggcaaagacgaccaaatcccgtctgtccgagcctacctcaaagaagcaagagaaaaccgcagagggtacttctaagttatttaccccggaaaaaccagagaaaccatcggtcagaaaggaacttcgggaaatacagaatgcaaggaagaaagaagcggagcggcgtgagaatagaaatgatccggtgagaaatcagggaaataaagacccgaatcagattcgccaccagcagccacaacagaaacgaaaaccaaggaaagggaaagagaggtaaattttatggataatagttttgattctttattaaatgcatcggctgtaccacaggatgaaaaggtacaggcatttattgcggaaagcaaaaataacaggaatcgctgctatgagttgtcagagcaggtaaccgcacaagtggcaacggatgggaaaatgctgcagaagtatctggatgtacagagtacctttgatcgatatactaccaataatgcacttctgattctggcacaaagaccagatgcacagaaattaggtgactatggatactggagagatcatggattttatttaaaacgtatggaacaacagaatccagttctgattttagagccaggaaaaacatataagcgtgaagatggtacagttggaaattattataatgcgaaaaagctatatgatatttctcagacaacaatgtccgatactacaattcaaaagtcagaatatgaagaacatgatttaatccgggcgttagtcagtacccctccggtaaatattgttgcagcagaaccagaacagatgccggatgaaaaaggagcattttttaaaccggaagaaggttgtatttatgtaagaaaagggatgagtgcacaggaaatctttcagaatcttgtgccggaattggtatttgccggatatgcggatggaaatccacactatgataaaaatgaagatgcatttcatgtatcgtgtgcgtcttatatgttgtgtaaaaaatatggaatggataccagtcgatataattttttacatgcaccagagttttttgaaaaaatggagactcaggaagtgagagtggaactttccagagccagagatgcagcgaatacaatttctgcaagaatggcaaaggtactggatcagaatcggaatgcaacttaccgacagtcagaggctgaaaaaaacgggcaagacagttctgaaaatgtgaaagataagaaagaaaatccagagcctgaaaagaaagaacagaaatccagaggacaacatagaaaagaagcacgctagaaaaattcgggaaaggagaatgcaaaatgagcagtgatacgattacgttagaactggataaatatgagagtggcgtagtgttccattccctaaaggacaagcggaatcagatgctgaaagagggaaaagatacggagcttgtcgatgacgttttaatgaaagtcattgagaaaatcgaagtaccgtcggagaaggaaaagcgaggacgcagaagccatgaagaacgatgatgagcagagcagtctgatgttggcggtaattggaattatcccggttatctggtttgcgttacttgtcgcaccttatctttcgtctggtcttatggggattctggatggagtcccggaagcaatgaaccatccgttttccattcggttatgtggggacagtgtaaaaactgtccttatttttttgctgtcttacggcatgggaatcgggatttatatttctaccaagaaacattaccgacgaggtgaagaacatggttctgctaaatggggaaatgtgaagaaaataaatcgcagatacaaggagaagcggtttacaaaaaataagttgctgaccatgcatgtgcagatcagttataacatgaggaaacatttgcgaaatgtattgacggttgtgattggtggttccggttcagggaagaccagattttttgcaaagccgaatctgatgcaggcgaatacttcttttgtggttttagatccaaaaggagaaaatctaagagatactgggtatcttctggaagaaaaaggatatgaggtaagagtgcttgacctgatcaacatggaaaagagccattgctataacccgtttgtatatctgaaggacgataacgatgtgcagagattggtaacgaacctattcaaagcgactacacccaagggaagtcagtcaaacgatccgttttgggatactgcagcttccatgctgttgctggcactgattttctatttacagtatgaagcaccagaggaagaacagaattttccgatggtaatggaaatgttacgtgccggagaagtcagagaagacgatgaccagtatcagtcaccacttgatgaattatttgagcggttggaaatgaaaaatccagaacacattgcagtgaagtattacaaagattatcactctggtagtgcaaaaacattaaagtccattcagattacacttgcagcaagacttgagaaatttaacttatccagtctggcagcactgaccgcaacggacgatttagacctgccatcactgggagagcgaaaagtggctttattcgcgttaatcccggacaacgacaccagttacaactttctggtgtcaattttgtatacccagttatttcagcagttgttctatctggcagaccataaatatggagggagacttccggttcatgtgcatttcctcatggacgaatttgcaaatgtttcactgcctgatgacttcgataagattctgtctgtgatgcgttccagggaagtgtcagtcagtattattttgcagaatctggcgcagttaaaagcattgtttgagaagcagtgggaaagcattatgggaaattgtgatgaatttttatatttaggcggcaatgagcagggaacacataaatatgtcagcgaacttcttggcaaggcaacgattgacacgaacacctatggaaagtcaacgggacattccgggaactattccaccaattatcagaatacagggcgggagctgatgacacccgatgaagttcgcatgttggataaccgatatgcgattctttttattcgtggagaaagaccaattttagacgagaaatttgatattttaaagcaccccaatgtgggacttacaactgacggaaacggaaaaccatatctgcatggagcagttgaccgggcagtggcaagtatttcactgggagacagcttggaaggcgagttcacagatgattctctggaagtggaagattatgaattattatccgatgaagatctggaagaaatcattcagaaatatcagtaaatccaagaaaaatatataggaggctatcaaaaaaatgaagttagatatgcgaaagaagcaggagaagaaagaaacaacaaaatcaacgaagaagctgccaatgacagcaaaaatgaaacgtgccatggcagtgtatattgcaatggtactgattatgacagcaggagcaagtaccgtatttgcggcagacgatccactgaccgttatcaataatctgtccacgtttatctttggactgattcgtgccatcggaatgattttgttgggatttggaattgtgcaggtcggtttatcactgaaatctcatgatccaagccagagagcgaatggattcctgacacttgcaggcggtgttattattacatttgcaaaagaaatcctgaatctgattacaggttaagaagaataggaaataaggaaacgggacggtgcaggtccgaaaggaatcgcaccgcccaggctaagacaggaggtgtttagaaggtgtcagataactgggtagtacagaacttgcaaaatgccttggatacctggaacagcaaacttgcagaaatctggcagatactcacacagtcaccggaaacctttaagggtggcggtatctggcaggtgattgtgcagatccatggagcattgcaggcaatcggctatgctttgttagtgcttttctttgtagtcggagtggtcaagacttgtggaagttttacagaggtaaaaagaccggaacatgcattgaaaatttttatccgttttgcgattacaaaaggcgtagtcacgtatggactggagctgatgatggcattattcaatatcatacaaggagtgaccagtacgattatgcagaccgcaggatttggaagtacggaagataccgttttaccggacgaaatcatagaagcggtagaagattgtggattttttgaaagtattcctctatgggcggtgacgttgatcggtggactttttattacagttctgagcttcattatgattatgagtgtatatggaagattttttcgattgtatctttacacagcgattgcaccgattccattatcttcatttgcaggagagccgagtcagaatatcggaagaagttttttgaagtcatacgcagcagtgtgtctggagggagcaatcgtggtacttgcctgcattatattttcattgtttgcatcatcaccgccagttgtcaatccagatgcagcagtagtcactatggtgtggagctatattggagagttgattttcaatatgcttgtactggtcggtgcggtgaagatgtcagacagggtagtgagggaaatgatgggattataaaaaacagagtatgtatggtaagaaaccgtacataccctgttgtatgttatgagcctattctacaatgtctttgctgtcattatatctcatatttccctgagaatcgaaatgaacagaatctaatggaatccctctttgtctggcacgagaaatctggaaggacatatcgtctttcataactttgtagtattgatgttcctgccatttgcgtcgcagagcaaaaatccagctgagaacagaaaaggcagtcagcagatagaggattgcaaatgcaagtttctcatgagttgctgcccatggattcagaattgtggaaacagcaagaaagtataacagcggtaaggtcagatttaatctggcagcaatccgaaacagcagagaaatcaggaatagagcaacggtaacaacaagtgaaatcataacagtgattggcataggtcagtcccccctttcatttacccaaagtgtaacagaacagaaaaaatataacaaatgtgcgatttggaggtgtatcgttttggaagtaaaaattaacaaggaaatcagggattacacggaagcaatctttttcggattgtccctgagacagtttatcttttcaggattagcctgcgggattgccgttgggctttattttttgcttcacccatacatgagcatggaaacagtgagctggatttgtgtactgggagctgccccatgtgtagtgttcgggtttgtaaaatatcatggaatgacagcggagcagtttatctgggcatggataaaatcagaaatcctgatgccgaaaaaactggtgttccggtcagaaaatctttattttgatgcggtagaaccagtcattaaaaaatatgagaaagaaagtctgaagaaggagggacgcaagaagaatgataaaaacgctgagtaatattttcaagcaggataaagaaaaatttgtaattccaagaagcgtacagcaggtaattcccatcgagactatctggtcagacgggatttttaaaatcgggagaaataaatttgcacgtacttataaatttacagatatcaactacgcggtggcaagcaaagtagataaggaaaccatgttcctggaatatatggatttattaaattctttcgattgcggtggaacaacaaaaataacgatcaataatcgtcgcttgaataaggtggattttgaaaaagcaatcctgattccgatgcaggaggacggactggatttatatcggaaagagtacaacaatatgcttttagataaggcaaccagttccaacagcatggtgcaggaaaaatatgtgacagtatcctgctataagaaaacaatcgaagaaggcagaacgtattttgcacgagtgacaacagagctgaacagtcattttgcaagattgggttccaaatgtgtagagataaatggagaagataagttacggattctgcacgatttttaccgtacaggagaagaatctggtttccattttgatattcaggagaatatgagaaaaggacacagctttaaagattatatctgtccggatacctttgaatttgaaaaagattatttccgcatgggagatcgttatggaagagtactttttcttcgtgagtatgcttcttacatcaaagacgatatgatagcagaactgaccgacatgaatcgaaatctgatgttgagcattgatgtgattccggttccgactgatgaagcagtacaggaagtggaaaaacgtttgttaggtgtggagactaatataacaaactggcaacgacgccaaaatgccaacaataacttttccgcagtgattccttatgatttggaacagcagagaaaagaaagtaaagagttcatggacgatttaaccacacgtgaccagcgtatgatgttcggtatactgactatggtgcatacggcagaatcgaaaaaacagcttgatgcagatacggaaacacttctgacaatcggacggaaaaagttatgccagttttctgttctgaaatttcagcagatggacggactgaatacagcactacccatcggacaccggaagattccggcagtccgcacactgacttcggagagtgtagcagtgttgatgccattccgggtgcaggagattatggacgcaggtggaatctattgcggtgaaaatgcaatctcccataacttaatcatgtgtaataaagaaaaactgttaaatccaaactcattccttttaggagtaccgggaagtggaaaatcctttaatgcaaaaatgcagattgtattcctggcactggcaacgcaggacgatatcctgatttgtgatccagagcgagagtatgcatcattagttgaagcaatgggcggagaagtggttcgcattgctgcaggaagccgggaccatatcaatgcaatggatatggtagacggatatggagatggcggtgatccagtgattgagaagtcacagtttattttatctctgtttgaacagttggataaaaaaggaatcaatgcaaaggaacgttccattattgaccgatgtgtgggagaagtttatgaggaatatcagcatggcggagcagtgccgactttgcgggtgttgcgtgaaaaatttttagaacaggaagaaccggaagcacaggatttggcactggtatcagaattatttaccaatggaagtctggacgcatttgcacatgaaagtaatgttgatgtgaataaccgtatcatggtatacgacattctggatttaggaaaacagttaaagaccatgggacttctggtaatcactgatgcaatgttgaaccgggtaacggagaactggaaacagggaaagcgaacccatatttttttagacgagtttcatgtagtatttgaaaatgagtattccggagcattttttaactctgcatggcgaagatttcgtaagcgtaatgcattcccgacagcaatcacacagaacgtggaatatctgttagattctgttcttgcaagtacgatgatttccaacagtgagtatatcgtgatgcttaatcaggcagagccggacagagcaaagttggcgacacttttgaatatttctacagagcaaatgggatatatcacaaatgcagatgccggttgtggtctggtgaaatatggaagttcgcttgtaccgttcgtcaatagattcccaaccaatacaaggttgtataaactgatgaccacaaagccgggagaggacagtatcaaccggggaagaatgtaaaattaaaaatattttgaataatgaaaagcaaggcactgaaaatcgtcacaatttgtggcgttttttagtgccggaaaaggagccaaatatgtcagaaatcagattttcatcaaaggaacacgaaaagtttttttatcagatgttagctaaatgcggaaagcacgacagttattacagttcatttttctattgtgtgggaatttctgaagataccagaaatcatgttgatcgcatgtttgattttaaagagcgtttgattaaaccagaagcattgcatgaagggtggcagacaggcggttcggcacgattgaccagactggctttcaacttgtggaatggatatgtggagaagggagaagaaagtctgtctaccccatacgagatgttcgattgtggctatgcatcatatttttatgaagcaatccgcatgaaatacccggaatactgccgggaactgccacaggtgagcaaaaaagaaactaatcatgaacgctagataaagattcaaatggagaaaagcgatggatcgtaagataaaaacacgccaagtccataaggatattaaagtattagataagacagttacagtgacagaccatgttaagcagtcctatgtcagaacaaaagaaaatatcatgcaatcgacggagaaatctagtgatagagagaataatccggtaggttatgcagaagatgcggccagcaagtatgctgaccgcatctttcacgaaacagggcatcaggtacgcagacaggcaggaaagattattgaacggaagaaagagaaagcttctgtttcttcgacaggcgaagaaacagtttaccagccgaaagaagaaattcgaccagtaccgccttcaggcggagaaacggcacaggagcagggaaaagaacttgctgtcaaaaaaattaagaccattgaacgggataaaagaaccatcaagaccgggagagcatcggaacaggttgtaaagaatactggaaaaggtactatcaagacctctggaaaagcggtcaagactgcagaacagacggcaaagaccagtattaagacatcggagcagacagcaaatgtttctgtccgggcaatgcattattccatgaaaaaagcagaaaaagcagtgcaggcagcaagacagacagcacagaatacaaagattgcagtgaaaacgacagcaaaggcagtaacacatgcaataaaagcgttgatggaagctataaaagcattgttaagtggattgaccgcaggcggttggattgcagtggtgatattgattatcgtcattttatttggtggatttctttgcatgacaggcggggataattccagtacggtttcttctgtcagtgcagaagtagaagcatatgagccactaattcggcagtatgcaaaccaatatggaattggtgaatatgtggaattgattaaagcgattatgatgcaggaatccggtgggagaggacttgacccgatgcagtgttcagagggcagttttaatacaaaatatcccaaacagccgaatggaatcacagatccggagtattcgatttcttgcggagtgcaggaaataaaaagctgtctggaacgtgcaggagtaaaaaatcctctggatatggaaaatattaaactggcattgcaaagctacaattatggaaatggatatctggaatgggcgaaagctagaggtggatatacccttgccaatgcagcagaattttctgatatgatggcacagagaatggggtggagcagttatggggacaagcagtatgtaccacatgtgcttcagtattatgcatttggaagaatcccgacaggtatctgcaatcaggcaatcgttcaggtggcagcatcgcaggaaggaaaaggcggaacgacttattggagatggtatggatttggaggcagggtagagtggtgtgcctgctttgtgtcctggtgtgcagaccagagcggttatattcagagtggagtcattccgaaattttctctttgttcggacggtgtgaagtggtttgaaagcaaaggtaggttccgtgacggaagttataccccggtggcaggagatattattttctttgactggggaaataatgggacgattgaccacgttggaattgtagagagtgtcagcggtggaaccgtcaataccatagaaggcaacagtggggataaagtggcaagacggagttaccgtatcggaagcagtaatatctatggatacggtgtcccggcatattaaaaggcaggagaaaaagtgtgatagtctaatggtgaatctggagtatacaattcctgaaaatagacttgacttttaaatattacaagcgtaagatttaagaaacaaaaaaattagaagaaaggaatatctatgaaaagtagacgaaaaaagcaaaatatccaaaaatcttacgtttgtaagatttttgggctgatagtagctataacagtaattgctgtttcaggagatgttttattaaaaaggacgataacggaatcaccagaagacacacttgtggaatatatgaaccatattgaaaaaaaggaatatgcagtaatgtatactatgatagattcagatgaaaaagtttatctgacaaaagaagaatacatacaacgaaattctaagatatacgaaggaatagaggtcagtgacattaaaatcagtcatatagctgtgaaagagaaaaaagcagatacagttacgctttcgtatgaaacatcatgtaatacaattgccggaacaatacaatttgacaatatggcggaactgaagaagacgaaacagggatataaattagtatggcaggatagcctgatttttccagatttagagagtgatgataaaataagtgttactacatcaaaagcggagagaggagaaatattagaccgagatggtaaaatgcttgcaggaaaaggagtagcaacatcagttggcattataccgggaaagctggaagacaggaatgtatctattgaaaaaatagcggagttattagagatagatgtagaaacaataaataacaaactcacagcaaagtgggtaaaagaagattcttttgtaccaattgaaactattccgaaagtagaagaaatagatttaatgaaaatacagccagaagaaaagacacttgaggagcaggattgtcagaataaacttttggaaattccaggggttatgctatcagatgtggaagttagaacctatgagttaggggaagcagcagctcatttaattggttatgtacagtctgtaacagcagaagatttggaaaatcatccaggggaaggatattcagctgaaagtgtaatcggaagatctgggttggaaaagttatacgaaaagcaattaaaaggaaaagatggttgtgatataaagattttggatagtgatggggaagtaaaagaggttcttgcaagtatttttaaagaagatggtatggatataagattaacgatagattccgatttgcaaaaatcattatacgagcagtttaaagaagatccggggtgttctgtcgcaatgaatccttatacgggagaagtattggctttggtaagtaccccatcttatgataataatgaatttatacggggcttatcatcagagaaatggacatcattaaacgaagatgaaaagaagccattatataatcgttttcgtcaagtatggtgtcctggctcaacatttaaaccagttgtggcaggaattgggttgaaaacggaaagcatagatccaaaagaagattttggaaatgaaggtttggcatggcagaaagattcgtcttggggatcttatcaagtgacaacacttcatgaatatgaaccggttattatgaaaaatgcaattatctattctgataatatttattttgcaaaggcagctcttaaaattggtagtgagaattttatgaatactttaaatgaaataggatttaatcagaatatgccgtttgagattgcgatgcaggaatcaacatattccaatacagataaaatagaaacagaaatacaattggcagatagtggttatgggcaaggtcagattcttgtaaatccattacatctggcaagtatttatacttcatttttaaatgaagggaatatgataaaaccgtatttgaaatacaaagaagaagcatccggtgaaacatggataaaaaatgcgtttagcaaagaaaatgtagaagaaattatgcaaggggtggaaggtgttgtaaatgatccggaaggaaccggatatgccgcacatcgtgacgatattttgctggctggaaaaacagggacagccgagttgaaggcaacgaaagaagatacttctggcaaagaaatcgggtggttttcggtgtttacggcagataaaagcgtggacaaaccaattcttcttatcagtatggttgagaatgtgaaaggaatcggtggaagtggttatgttgttaaaaaagatgcaacagtattggatgagtattttgaagaataaaaaaatttttatgggaaattattacatatgtaagatatttgcgatgatattgatagttcttattgtttttacagggtgcggacaaaatcgaattacggaaaaagaagaaaagaaagaaaccgtagaatctgaaatgaatgcagaagtaaaaaaaacagcgcaaacttttcggtctgtttatatgaaggagaagtcggagttaaatacattaaaggtgaaaagaaaaattatcaattgtctggaagaaaaaggatatgcggcagtagattgtgataatcagattgatatggtcaatcgtgaaaaagtagaagatttttgcaaaacagcggagaaagaagaacaggcagcagttgatattgttgttgtatttgatgaaggggaaattatacaatatcatttagagtcaatgaatggaaagataaatgttcgattatgtcaggttaaatggaaggataatagcccacaggctaattattatgatgaatatgaagcatatgagtggaaatatacagaaaaaggatacttgtttctggaggaatatcacccaccgggatttgatggagcaccgggtgaaactggattcagagtgcagccattagataaaacatgccgggaattgaatcgaaaatatgttatgccgttggggtatgcacttaataatctgttgattacaaattgggataaccagaattatacggaacttgatttttatgatctttatgaaaaaatgtattatatgaaatatggaaagcaagttccatatgaagcaaattatggtggagcagaatatgaagttccaaaagatgagtttgaagaggttataaagacctatttaccatttagtaatagcgagattgaaaaaggaactttttataactctgataatagaacttttagatacagaccgcgagggttatatgattgtgaattcccatatgagccatatccggaagttatctcatatgaaaaattacaagatggaacattaaaacttacgatagaagcagtatgggaaatcagaatgttagatcaggcaatcaccagtgaattgatgataaaacctatggaagacggaagtttccagtatttatcaaataaggtaatcagttcagatcaaaatgcaaatgcagggtggtatatgccaaggttaacagaagaagagtgggaagagaattacagtaataattagggggcaatatgaaaagaaaaagtattttgttagtactttgtataggaatgattctgacttcctgtgaaagtaagatatcgttaaacagcacagatgtaaaaaatgagaagaatcagaaaaacactaccatggaaaatccggataagggatataatctaccaatcgatgaagacaagaaaaaggaagttgtgaacgattgtgaagaaattatgggcattgtccgagacatttattctgaatataatggaatacaagaagcagatcagaacactgctgagcaaatgatgaatcggatgaaagaaattatcaaacaaaatgggaatccggttattggttccgatcattattctgttatggataattatcagaagatggaacaatttttaaaatctgcagaacaagaagaaaaaggaagtgtaattttatatgaagcagatacagatggtggaattaccagaaaagaatatagttatgatggaaaagaaatgagtgtgatgtccgcaaaaatgatctggagtgaggatacagagcctgtacttacatacatatcgctatcaaaaataaaagaatgggcatatactgaaaatgggaatttctgttatgaattatgcgtacctgaaccaccggaagtgacagagattgtagatggaagttgtattatccgggtaaagcctttgagtgaggagtgtcgggaatatttaaaaaaatatgtgagtacgttcggctatcaaggaaacaatctgttatgttcaaactggaatgcggaggatatgcaggggttggattataatggactttatgaatatttttatcaaatgaaatatggagaaaaatttactgcagaaaaagaggtaacgatctggtctgtaacatcaacggtagcatgggctgtcggtgtggttgaagtgttgatacttaatatatttatgtaaagaatatcagaaattttggtatactttgatatacaaaaatgagctggccggaaagtgtggaatgagtagtgccccataatttccgactggcttttttatatcaaagtatgtaaggaaatgtattggtggctagctaaataaaaataaacaaaaataaacatgatatattgtgaaaacgaacaaaaagattgataaaaaatagattatattgacaaaaataaacattagagataatatataaacacaaacgaacagtataaaacgtttgaaaatgtgaaaaaaggagaatgattatgccgcagtgtgttgtaatcgcagatgacctgacaggggccaatgcaacaggagtattactgaaaaagatgaattataaagcatacacagttatgaacacagaacggatcgaactgtctactttgtcggactgtgactgtgtattatacccgacagacagcagaggagtagatgcaaaaatcgcatataacagggtatacaatgtctgcaatctgcttaaggatgacgatgtcaaagtatatgccaaccggattgacagtacacttcgcggaaatctcggaagtgagaccgatgcgatgctggacagcctgggagaggattatatagcaattgtggcaccgtgttttccggcttcgggaagaattatctgtggcggatatatgctggtggacggactgccgttacataagacgaatattgcagttgatccgaagacaccggtgaagatatcagaagtaggagaactttttaagcagcagagtaaatatcaggtatctacgatctatatgaaagatctgatgcatggaaagcattatcttgctgatctgatgaaaaaatgtgtggaggaaggaagccggatcatcactttagactgtattacacaggaagatctggacttgatcgccgatgcagtgatcaccagcggattaaaagtgattgctgtagatccgggagtatttaccgcaacgttatccagaaagctgatcacgccgaataagaaaaaacagaagaccaagatccttgcagtggtaggaagcgtgaatgccaataccacggcccagatggaagaattgtggctttcacagagaacgcataatgaattcgttcatacaagagaacttctggaaggtgaaaaacgcagagaactggagatcagaagggtggtcaattccattctgggtgaatgcgacaggaataatatatcaaccgtaaccggagacggaatctatccggagaacagaattgattttacaccgtatatggagcgatatcagtgttcactggatgaagtgacagaaatgatcaatagtggattcgcggagatcacgtatcgtatcttcaaggcagaagatacattcaaaggactgtatacaagtggcggggatatcacagttgctgtctgtaaaaagttcgataccgcaggcttaagtctgttggatgaagtacttccacttgcagcttacggacaattcttaaaaggagagtttgaaggtgtacatatcattaccaagggtggaagtcagggaaataaagatgcgatcaataagtgtattacttatttgaaagaaaaattatatatctaagaaagggtgagagaaatgaagaaaccagttattgcaattccaatcggagatcctgcaggagtaggaccggagattgtagcaaaatccattgcatccgatgaggtgttccagattgcggtgtgtgtcatcgtcggagatcggaagatcgtagaaaaagcaatcgagatcacaggagagaatttgaagatcaatgagatcaaagagccggaagaggcagtcgatgaaaaaggagtcctgaacctgatcaatcttgacaacgtggatatggatacatttgcctatggaaaagtcagcgctatgtgcggaaaagcagcgtatgaatacattgcaaagagtattgaactggcaaatgcgggaaaggtcgatgcagtggctactactccgatcaacaaagaatcccttcatgcggcagaagttccgtatatcgggcatacagagatctttggagcactgacacatacagaagatccgttgacaatgttcgagacgaatggaatgagagtattcttcctgacacgtcatgtatcgttaaggcagatgctggatatgatcaaaaaagacaggatcattgattatgtaaaacgctgtactaaggcattggaaagactcggtgtgaaagaaggaactatggcaattgcagggttaaatccacacagcggagaacatggactctttggctgggaagaagtcgaagagatcatgccggcaatcgaagaactgaaagcggaaggttatgatgtggcaggtccgatcggggcggattcagtattccatcaggcagcgcagggaaaatataccagtgtattatcgctgtatcacgatcagggacatatcgcaaccaagacactggacttcgaaaagacgatcgcaatcacaaatggtatgccgatccttcgtacatcggtagatcacggaactgcatttgacatcgcaggaaaaggaatcgtaagtgcggtcagcatgatcgaagcaatcagacttgcagcaaaatatgcaccgaatttcacgggaaaacatgaaaaataaaattaagaaataaaacgaaaaggaattgcggcaggtaaataactgccgtaataaaaagagagaacataggaggtctgcattatggtaaacggacttagtggggaaaggatgttgattggtctggcggtaggtatcgcagtcctgatattccttgtgttaaagacaaaaatccaggcatttcttgccttgatcatcagtacagttgtaacttccacctctgacctatctacctcgtcgtcttcaaggggtcttactacttacgtagggatatctcatcttgaggggggcttcacgcttagatgccttcagcgtttatcccgtcccggcttggctactctgccatgcatttggtatgcaacagatacaccagcggccagtccatcccggtcctctcgtactaaggacagctcctctcaaatatcctacgcccacgccggatagggaccgaactgtctcacgacgttctgaacccagctcgcgtaccgctttaatgggcgaacagcccaacccttgggacctacttcagccccaggatgcgatgagccgacatcgaggtgccaaaccactccgtcgatgtgaactcttgggagtgataagcctgttatccccagggtagcttttatccgttgagcgatggcaatcccactttataccaccggatcactaagtcctactttcgtacctgctccacccgtcggtgtcgcagtcaagctcccttctgcctttgcactcttcgaatggtttccgtccattctgagggaacctttgagcgcctccgataccctttcggaggcgaccgccccagtcaaactccccacctgacattgtcccccgaccagttcatggtcgctggttagaaatccaatactgcaagggtggtatcccaacagcggctccgtgacaactggcgttatcacttcctagcctcccacctatcctgtacatgcaataccgaatcccagtatcaagctggagtaaagctccatggggtctttccgtcctggcgcaggtaaccagcatcttcactggtatttcaatttcaccgggtgcattgttgagacagtgcccaaatcattacgcctttcgtgcgggtcggaacttacccgacaaggaatttcgctaccttaggaccgttatagttacggccgccgtttactggggcttaaattcaaagcttcgcgttaccgctaacctctcctcttaaccttccagcaccgggcaggcgtcagcccatatacttcaccttacggttttgcatagacctgtgtttttgctaaacagttgcttgggccaattctctgcggccagttttgagcggagaccctttcgttcttagggaaggcggactgccttagaacttctgcatcgtgacatccagcaacaaacacaataccaagtctttctcatggaccggggtaagccacgatgatgaactaaatagaaaatttaccccgcatctcaaacccatgatccatcggtccgcttccttttcccagatctaacatggcttccaacgccccgctgatatattctttcgcgcggtgaatagattcttccagagaatatccttttgccagattggatgcgattgcgctggataaggtacagccggttccgtgagtgttcgggttgttgattctttttccgtggaaccatgttgcttctccatcctggtataggagatcattcgcatcattcaggctgtgtccgcctttgcataagactgcacagtgatacatttcatgaatcttctttgctgcttccaccatatcatcttctgatctaatctccatttctgcaagaacttctgcctctgggatattcggtgtgatcacagttgccattggcagcagctgtgtttttaatgtatcaatcgcggtttcactgatcagtctggatccgcttgttgctaccatcactggatcaactacgatattctccagatggtactcttttagtttctttgatatcatttttattaactcttctgatgacaccataccgattttcactgcatccggacggatgtctgtgataactgcgtccaactgttgttccagaaattccggagatacttccatgattccggttactccggttgtattctgggctgtcagtgcggtgattgcactcattgcgtagactccgtttgcctgcatcgtcttgatgtctgcctgaattcctgcacctccacttgaatcacttccggcgattgtaagtgctgtcttttttttcataagttctgcccactctctacaataccagtctgcttctctccgaacctcttcctggtcatccttacttgtttcatcatagattcctacaacctggaaccctgcctgctttgcagtacggattgcatgaatgacatcttcgaatacaaccgtctcctccggacgggttccgagatattctgctgcccgcagataaatatccggcttcgtctttcccgcaccgacctcttcacaggtaaagatccggtcaaaatattttgcaattcccagacgctcaaatgccatctctatctcttttttattattggatgatgcaaccgtcattgggatattatgcttatcaagcttttccagaagctccttcgctccactctttaatagtgcggttttcttataataattgctgatgatgtccagaactccctgcacaatttcttccggctcctgggacagatgataatgttcttttacatatgctgcaccttcctggatgctcattgtaaataacaccgtcccaagatccggctctgcctctataccgatactgttcagataacggactcctacgtcttcccagatctccatggaatccagaagggttccgtccacatcaaatattgctccttttatcatgctttcaccatttctcctgttaaactttttagtttctctgtcgcttttttaatatctttttctgcaaatatcgcactgatcacggcaattccacagattccggttcctgcaagctctgatacattttctttactgattccgccgattgcgattaccggaatgtctaccgcatcacagattgcttttaatgtctcacgacttacctcagcaacatcggctttcgaatctgtatggaatactgctccgactcccagataatcagctcctctcttttcggcaagaactgcctgttctaccgtctgtgcagatacaccgatgatcttatccggtccaagctttgctcttacgtcgtctgcttccatatcactctgtccgacatgtacaccatcggcgtccatttccagtgcaatatccacattgtcattgatcacaaacggcaccctgtatctggcacaaagttctttgatttcttttgcttctttcaggaaatgtgcttcatccagttctttttctctcagctgtacgaatgtcgtaccgccttccagcgttttctctacctgactgtataacgtctcaccatttaaccagtggcgatctgtcaccgcatacagcagtaaatcttcttttttcatctttttacacatatgttctgccctctccttcatctgatctttttcgagctccttatctgatctcatattttgcacctttatccaatgtctctttatccatattgtagatagcatcaatgatacggttgcggtaagtagcgttaccgtcacctttctgcatataactccatccgatctctccggccagccccattgtacatacagctgctgcagctgcttccagtttctgttccggattcgctgttaagaacgctgtcatcattcccgataactgacatcctgttcccgtaatctttcccatctccggacgaccgttgcggatcacatagcatcggtctgcatcacttaccaggtcaatcgcacctgtaatcgcaacgatacatctcgcctttttggcaaatgctttggcaaatgcaataccttcttccagattctcttctgttacggcatctgtcacatctgcatctaccccttttgttgttccgctgccctgtgccagtgtttttacttccgagatatttccacggatcacatcgaacctgatcttctccatcagttctacagctgtattcgtccgaagtgtgctcgctcctgctccgaccggatccaataacgttgcatgccccaactcattggcacgcgctccggctgcgaacattccctcaatacttcttttgctcaaagtaccaatgttgatattcagccctccgcagattgaagtgatttcctttacatcctccggttcatctgacatgatcgggcttccaccacaggctaacaatacattcgcaacgtcatttaccgttacataattggtgatgttgtgtaccaacggtacattctttcttacattttcgatacagtttcctaacatattttcttcctcctgttattcatgtattcccgatttttccatctacaggacctgccacctccagggcctgccactggcaaccccttacggatactttggtaactggcagctcctttcgaatgcatggtaatcaaaaaaggacagatctacctgtttttcagatacatctgccctgtcggcaacttttctttccctacgttggcatgatccaaatcagtttcccgggtcaagacatctttagtctactctcagcccgctcagattacggactccccttttcctttaatgatctccattatactacgcttttaatatttgcgcaatgtatcatgactgtcatctgttgtattgtcaatatttttgatcacgatataatatccgtcatttccgttggtcttaacaagtacacggtctccgaccttatgtccctgtatcgctttgccgagtggtgattcaatactgatcaggccctgaagggaatttcccctgatactggttacaagacgatatgtctctgtctcatcatcatcttcaaaatagacctcgaccgtattattgattccgacttcatctgctttcgatgtatctgatacgatcttcgcattcttaagcattctctccagataacggatacggctttcatttcggttcttatcctgttttgctgccttgtactcaaagttctcgcttaagtcgccctgcgctcttgcctcttttacagcttccagttctttcttacgcacaacaatcttgcggtattcaatctcttctttgatcttcttaacatcactttcggttaactgttctcccatgaaaatgcacttcccttcttctctccgtatattataatactctgatacacgctctgcaaattctaaatcaatccataatgctccatcgccttataaagcccgtcattctccactgtatccgtaatgtattctgcatatggctccagaaccggatcatgatgccccatgatcactccatgcccggcagctttgatcatatcaaggtcattgctgctgtctccgaatgcatagatttcatcatcagccagatgcagttctttctgtatgtactcaattgcagttgccttggaatactctttctgtacacattcatagacacctcccagacggtcgatatggttaaatacatcttctgtttctttaaagaatcgttccccatctgccatcttatctatatagatcagtatcttatcaaaatcatagcctgtatcttccattgcctgttctcttccaagcccaagtcctgccatataccttctgctgctttctaccggctccagtctggagatccggttcgaataatagatatcctctgttccttccagaaatccttctactttacagtccttcatgcttttaataatttcacgtcctctttcatagggaatcgaatgatgaaacacaacctgttctccatagatcagatgcgttccgcatccacacaggaatccatcaaatgatatcctctttatcatcggtggtacactgcatatggtacgcccggtattgataaatgtcttgtgaccgttctcctgtgccttatgtaatgcctccagtgcactttccggtattttatgtgtaatctcacttaaaattgttccatcaatatcaaaaaataatgctgacataatttcctccatgatctgtactgccagttttttaatcttcctgatctgtcaccgacttttttacaagcgtccgacacaaaaaactgacatcgtctattataaataaacggttcgctcttttcaatagatacagcggtttctatcttccatttccgacaaatatctggtagtataaatatattatctatagagcatgaagtacaatagtatgcacttcactgttttaaaacaggaggtattcattatgattacattagaacattttgatgaagtcgacatgagagttggcactattacagctgtatcgttgaataaaagggcaagaaaacctgcttataaaatcaccgtagatctcggcgatttcggaaccaagaacagctccgctcagttaaccaactatgagcctgaagaactggttggaaagcaggtagtctgtgtatgcaactttgaacccatgagaatcggtgatgtaaaaagtgaagtacgtctgctcggaagtgataccgatgaaggatgtatccttcttacttctctgactccggtgaaaaacggaagtaaaatattttaaatcgcccaggacttgccaccggcagcttcttccgaatacctgataaatgtaaaacagggtcagagaaccgttcttctctgaccctgttttttattcatatcttacattaattttctgaacagatctttcagatcttctacgcttgcatctttcgggttacccggtgcacatgcatctgcgtgagcggattcagcaaggaactgaaggtcttcttctttcagagcttccagttttgtaggaattccgacatcaacagataatttacgtacagcatctactgctgcttttctgtattcttctactgacatatcatctacgccttcaacgcccattgcttttgcgatttctttatatttctctcctgtgcattctgcattgtattccataacgattggaagcatcattgcacacgcaacaccatgtggtgtatcatatacagctccaagtgtatgagccatagaatgtgcgattccaagacctacgttagagaatcccattcctgcgatatactgtccgagtgccatgccctcgcgtccttctttttcattggcaactgcacttcttaaagatttggaaatgagttcgattgcttttaagtggaacatatctgtcatttcccatgcagcctttgttgtatatccttcaattgcatgtgtcagggcatccatacctgtcgaagctgtcagtccctttggcatagaagacatcatctccggatctacgactgcgataacaggcatgtcgtgcggatctacacagacgaattttctcttcttctcgacatcagtgataacatagttgatcgttacctctgctgctgttcctgctgttgtaggcactgcaatgatcggaacacatggattcttggttggtgctgttccttccagacttcttacatcttcgaattccggattggcaatgatgataccgattgctttggatgtatccatagaagatcctccgccgattgcgataatataatcagctcccgctttcttaaatgcctcaactccgtgctgtacattctgaatcgtcggatttggtttaatgtcagaatataattcatattccagtcctgcatcatcaagtacttttgttacctttgttgtcacattgaatttgatcagatccgggtctgaacataccagtgcttttttcagtcctcttactttaacttctgctgcaatctctttgattgctcctgctccgtgaaatgatgtctggtttaaattaattctgtttgccatgataactgacactccttttatacatattctttatttgcgatgcgaaatatttttattttcttgttatccgcatctcttttctttatgtctttattttaacaacctttttcttgttatgaaagttacaaagtgattattttgtaacttttgcatgttacacttttgttattttgtaactttttatgctttgttcacaataccattcatttttatttgttatataaataactttgttctgtccagcaacagccatcggaagcttccttcgaacgcatggcgataccaaaaaacacttctctcgcatactttggtataaaaaaagaactcccttttacaggagttctaatttcttaaatagtgtttccagctctgccggcattgctgcaaccagatttctcgccatctcttccgggcgctttttcatatctccaagtacccactgcgttgtcatatatacagatccctgacaatacatttccagttggaaatgcagattctcaggaattggctgttttgtcttttcctgaatctggttctcatagaatcttaagatcagctgaaaatcatgatctcgcagacaattctgatcatcattacgaaaagcagctttgaagaataatttttcttcttctatataatgaaacttattaacaagaccttcataagccgtcttaccttctcccatatgctggaacgattccaacaggatccggtcaaaataccagttgatcagatcatatttatcctgaaaattccggtaaaatgtctgccttgtcgttccgcattctgttacgatttcttttaccgtaatcttttctaccggcatcttcttcatacagtttttcatagcgtccgccagacggtatttcattttatcatgttttgtttcttccaattatatcatccccagttagaatacttttgtcgtccatttgctcatgtcccagacttcatttaccacatcctgatagaattccggttcgtgacagatcaaaaggatgctccctctgtattcctgcaaggcttttttcagcgaatcctttgcatccacatccaggtggttggtcggctcatccaggagtaaaatatttgtatcccggttgatcagtttacaaagtctgactttcgcctgctctccaccacttaatactctgacctgactttcgatatgttttgtcgtcagtccacattttgccagtgccgaacgtacttcatactgtgtaaacgacggaaattcctgccagatctcatcgatacaggtagtcttgttctcgcctttgacttcctgttcaaagtagccgatctccagattctctcccagttcacaacttccggataaggatggaatcaatcctaaaatgctttttaataatgtagtctttccgattccgttcgttccaaccagtgctatcttctgtccacgctccatactgaaatttaatggttttgataacggctcatcatatcccgttaccagatcatgtgtctcaaataacatctttccaggtgtacggccataacggaaatgaaattccggcttcggtttctctgccgccagttcgatcacatccatcttgtccagcttcttctgtctggacatcgccatatttctggtagatacacgtgccttattacgtgccacgaaatctttcagctcactgatctcctgctgctgtcttctgtaagcagcttccagctgcgctttcttcacagcatagacttcctggaagtgatcataatctcccacataacggttcagttcctgattctccatatgatagatgatattgaccacttcgtttaagaatggaatatcatgcgagatcagaataaatgcattctcataatccagaagatagcgcttcaaccatgcgatatgttcctcatccaggtagttggtcggctcatccagaagcaggatatccggcttttccaataacagttttgcaagaaggactttcgttctctgtcccccgcttaagtctgtaacatcacggtccagccccagatccagaagtccgagtgctcttgccacttcctctacctttgcatcgatcgtatagaaatcgtgcagtgtaagctcatcctgaatggttccgagttcgtccatcagacggttcatctcttcttcatctgccgttccaagcagatcacagatttcattcatacgctgttctttctgaagcagcggatcgaatgcagattttaacacgtcacggatggtcattcccttttcaaggaccgcatgctgatccagatatcctgcatatacattcttagaccattctacttttccttcatccggcacaagctttccggtcacaatattcataaaggtagattttccctctccgttggctcctacaagaccgatgtgttctccctttaaaagtcgaaaagaaacatctgagaatatggctctgtccccgaaaccatgtgtcagatgttcaacatttaatatactcataaatttctccctgattattcacttttttaatttgaaaagatgccagcaaactctctgctgacatctacattataacgtttcaaccagaaccttgcaatcataatatattccggtttgattcatacattctgtattacatctgcattatatcgctttacagaaaatactcctcttcatcccgccatacttttccttcgtcatcacctgctcatactgtaatttcaggaatgtattcacacttgccacattgtccggatgtgccgttccaagcagataatgatatccctgttctttcagaatctgttctgactcttccatcatctttctctgcaacccctgtccgcggtattcttttcttaccatggcaatctccatatgcaccgactgctttcgctgatcttcatcaaatttcagatcgtatccgagattctcatccccaagattcttcgtccgtgcgataaagacacctgccagtctgccatcacacattgcctttaatccaaagccaccggtcatcatatagcttgttacttcctcatcgctatccagactgaaccattccttattcggaagttcactatagatttcatggatcattcgaagaatatccggtatatcctgctctgttacaactgctatctcattcatatatcttctccgttcatttttgctgtttacagtatcatactgtaaatatgttcatctgtaaatagatgaacttttatcgaatatgcaatgccaaaaaccccgtgggacagcttcttctgcctcacggggttctcctttttccactaaccgttcattctatctacagaatgcatgacggttcaaatgttccggtaaacttccatgtcatatcttcttctgccggaagatacgttacattcggtctccatgttccaactactacattttccgaattcacccacagacaatattcttctctgtatgatgtattcagaagtcccacagagagatacaatgaatcttcatcaaacgcataagataccgcatgatatctcttcgtaaaatcattcggatacatatcattacatttccagtccttatatcctgcaaaaagaatcttcttttctcctgccacagtaagttccagttttaattcctctccaaccgttgaaatcactgccgactcaatttgtcttggattctctgtaaacacaattcttttatttaatagtttctttgttgcttcatttgtgtcttttttgtcaccttccggcttcggaagtgtcagatgtaccagtttctcttccagtttttcctgtgcctcttccagattttctttttcacacgggatctgaactgcttcttttatgtatttcagacagatatctgctgccagatattccgatgcccctgccgtgattccgattgcaaccggataatcacgaaaacagatcagatactgtccaaatgctccttctgccgcaaaaatctcttttccggccttgatatgataagcataatgcgtcagtgctttcttctcatcttccggaatcacaacgcgcatctttcctatctcttcggtccaccatgccggtatcagctgctctccattccattcacctttttgaagcagaagctgtgccagtgcagagatctttcctgcagtcaggtacattccccatccaccggtgttgtgtccttccggactggtcagccagttgatctcaccaaatcccatcttgtcaaatacacgctcctgcatcagtgccagacagttttttcccataacctttgtgacaattcttgaaagtgtataactacatccggaatcataatggaatgcttttccgatatcttctcttatcttcggctgttttaaccagtttgtctcccagtctcttgtaagcttcgaaaaccatacattattgcagcattctttggaacctgcctgcatggtaagcagatgatagatcgtcagatcttccagtgccggatcgtattcttccggaagttcatctcttacataatcaagcagtttatcttccagatgaatcttcccctcatcgagtgcaaatcccagacaaatacttgttccgatttttgaaagtgaatgcagcatctgcggcttctccagtgagaacggctcccatgcaccctctaagataacttttccatcaaaccgtactgagatactgtggatttccactgtctgttccagttccgttaacatctctgtcaatttctccggattcagtcccagttcacccggttttacataagttgccgccatcttacttttcctccttttttacagatggatcccagagtgaagtctcgatacggataccacctttctttgtcaaatagattccgatcagtatcagtgcaagcataacaataaccgctgctactgcataagatactttaatactgaaaataccctttacaaagataactgtataaatgatgatacttacagtacagaatgtatataatgccccatttgaaaaatggaatttattctttgcccatgcttccggatatctttttggaagtcttgaaattgcatatacaacagtcacattcatgaagaatgtaattacctggaaaatgtttgtgattgttacaatgctcatatccgaaacgattgggatcagaacaacgatcagtgtgtatgtataaatcagatacggtgctccaaaacgattctcttttaaaataaactttggaagccatccgtcttttgcagcctgtgcaagcggatatctgacatcattgaatacaccattcagtgtagtaatgatcgccatgattggtccgccgatcatgaaaatcttatatactgcaccaggaaggattgcctgcgctgccggtaagattgtcggtgctcctgcaacttcatcatgcggaagcacaccgcctgttaccatggcaagtcccacatagatgaacagaagacatggcacacatgccatacttgcaaacggtacatcctttgtcgctttctttgcatcttttccgtaccagaggatattgtaatatccatttgctgagttgatcagaagtaatgcagcaagcatgaatcctttaaagcctccggtaaacatcttatccccagagaactggaagatcggctgcttgatctgtgtcagtccaaagataacataaagtaccatcgtgatcaacaagatcgttgataagatcttactaacctttgcaaaaatatccattcccagaaggtttaatacaaataagatgcagattcccacaacagcaattgcttttactgtaattcccggaagaagattatttacatacaagcctaatgccagtgcaaaagagctgttcaggattggagttacaagcttcgtatacgctaccagtcctcctgcacttacaccggataaattcgttacaatcgagtaaggtccccctgccactctcatagttccccctaggataatatacggaaataccataaaaaatcccataacgatagctgtcagatatgccagccatacggaatatcctgtcattgccatcgccggtccgatcaatgttaccattcctgatccaattaccattcctaccgcaatagcaaagagatctcctcgctccaatataccaggctttggttccggagtgttcacgattaagttcttgttactcatttttctttctcctttgtcctttactcttatcatttattttttattatttataaatgataatgtatccataatcaaattgtaatcaaaagcgccggacttgtcaatcgttaatcacaagttcgacgttttacataatttttactttattttttgtgcatatttacttttcaaattccgtcaatacatcctctaagcttcgttctatatgctgatgcatcttcatcgctgcttccatggtatcgcattttttcatactttctacaataccctcatgttctttcaacgatttttttgcatactctgcttctgtcatctttactcccatcgataatccgctccagagttccgaaagcattttctttaatttttcattcccggcagctatccatatctccatgtgaagcgactgattcagcttcgaatagttctcataatcctgtttctctatcatctctttcgaaacagttaatacctgctcgatccggctcatatcaatgcggttcttacaacacaatacacacgcttcactttccagtgccgcccggatctggaaatgttctctgagcgttgtctcattgattcccagtaccgttgctcctttgttctgttgcagatctatcaagccgtccctttctagaatctggaatgcctctctgactggtgtaatggagaccccaagctcttgggccgtactttccagagttaacacttctccttctgtaatctgtcttgagataatcgcctttctaagtgctgccgccactctttcccttgccggtaacatttttatcggttttaaaccaagcattttttattctccttatcaaagttttccttgtgtttatattgtatacattattatctataatgtaaaccctttttctttaataagtcttccgttgatttttgctcatattctcgcgttctttctcattttatgttataattttcttaaaaacttaaggaggttttactatgagccatatttcctatgccttcaatcattctgacatagaagcaaccgcttacgctcttaccgttctgcctcgtcttggacttgcagaatcagaagcccaggcagaaattaattatcaactctgttgttctgcggcgaaaaaattgattaatcacgccacagatattacacccgacgaatttcgtaccattattgcagcactccaggctgccaaactcatcattcttggtgatatcgaagtcgatgcaaaaacatgcagcgaatgcaagagttatttctttacgatcaacaaattattatccacctttgaaaagcaattattacaggaataagatcaactgaactacagacaaagctgccgatggcagctttgtctgtagctttgctatgcaaagaaaaaccccggaaacattgcatttccggggctgctgtgtacttcttttttgtatatctcgaatgattcgtataaattatctctttgagaactgtggtgctctacgagctgctttgagaccgtatttcttacgttctttcatacgtggatcacgtgtaaggaatccagctttcttaagaactggtctgtaatcaacatcagcctcaagaagtgctcttgcaacaccgtgacggattgctccagcctgtcctgtgtatccaccacccttaacattaacgattacatcaaattttccttctgtgtctgttgcagctaatggctggcgaacaacaacctttaatgtctcaagtccaaaatactcatcgatatctcttttattgatagtaattttacctgttcctggtactaaatatactctagcaacagatttttttcttctacctgttccgtaaaattttgcagtagccattgtaaaatcctccttttaacctttcttagaatttcagttcaactggtttctgagcctgctgagcgtgctctggtccagcgtatacgtgaagtttcttgatcatagatcttcctaaaggtccctttggaagcattcccttaacagcaagttcgataaccttctctggtttcttagccatcatctctgctaatgtagtctctttcattccacctacatattcagagtgattgtaataaatcttctgattcagtttcttacctgttacattaaccttttctgcatttacaacgattacataatcgcctgtatcaacgtgtggtgtgaactccggtttgttctttcctcttaaaaccttagcaacttctgatgctaaacgtcctaatgtatattccgaagcgtcaactacataccattttctttcaatcttatctggattagccatataagttttcattgtggtttacctcctgtgaatcattaacattttcatgataatatatcagaatcagcaagattccggggctttggcctcttactgtttctccttttgtcatacttgcttattatattatactgtaccgtgtgtgtcaactgttttttgacatatttttcttatatttttacttattttcgttgatcaaatgtacttttcccgagaatcttcccgtacatttttcatactaaaattttaaatactgtacactatatggtttcagttcaagctgaccattcatcgtaaccgtttccccggtcagcagatctgctgccgttccattcagttctcctgcattggcagtgtatggataatccgcagcattgattgcaacgatcactcgttctttctctgagcagcgctcgaataccagctgatgattctggatcactacattcttataagcaccattgcaaagtgcatcactttcctggcgtacacggatcagtttcttaataaactctgtcagctcatttggctttggttcttcaaagcaagggcgaagcgcatagtcattatccggtgctttctccccctgctcagcccattcacttccataatacaggcacgggattcccggcatacccataagcagtccgtatgccagcggaatatgtttcttattcgtcagaatgcttgccagtcttgtaacatcatgattatccacaaatgtcatcaggtgctttcctctgtaaatacaccactgatcacttccgaactgacggtgcagggaatgtgcgatctcgaacatattcatactgttaaagctggaatataatcccttgtagcactcataattcgtgcagctgtgaagcatctcatcattcacgataatattataatcgccaaacaatacctctccgatcagtgcaaagtccggttttaattcctgtgtataagagcggagacgtctcatgaaattatgatccagactataagccacatccagacggagaccgtcgatatcaaattcgtcaatccagtattttacacattccatcagataatctacgactgccggattctgaaggtttaatttgaccagctcaaaatggccttcccatccttcataccagaatccgtcattatagcagctgttgccgtcaaagctgatatggaaccagtctttgtacggtgaatcccatttcttctcctgtacatctttaaatgcccagaagcctcgtcccacatggttaaatacaccatccagtacaatttttacgttatgtttatgcagatcttcacagacctctttaaaatcttcattcgttccaagcctgcagtcgatcgtcttaaaatctcttgtatcatatccatgattgtccgattcaaagatcggatttaacagaattgaatctactcctaatgtctgaagatactcagaccagtccataagtttgcggatacgaggaacacacacaccgtcattgtgcaccggtgccccacagaatccgatcggataaatctgataaaaaatactattgtaagcccacattactcatccatcctttctgtgtctgccataaactatgctccggcagatcactcactgttctattataccacatttcgttctttaaagacacaaaagacactgccactggcagtgcctcttgcatacttccctatctgaaagacctgccgctggcaggttatttcctgttatatataagtttctctccccgcatgaatatgtagaaccatacaaacagcagcacacctttcagaatactcgaaatcgtaatactccaccagatcccgttcagcgcaagtgttgtatgaaccagtatcagcgcaagcggaatcctgagcgccgtaaatacaatactgatcacagatggcggcacggtctttccataccccgaaaatgcacctgccgtcgtaatctcaagactcataaaaagctgcgatacaccaaggatccgaagataatccactccaagcggaattacatctttttctgtaataaaaatccggaataccggagccggacagcatattaataatagcgtacagaaaatcccccatacaaatactacttttaatgcgctgacatatccctgatagatccgtctcttcttacctgcgccatggttctgcgatgtaaatgaattcaccgctgctgcaaaaccatccgctgtcatccacgaaattgattctatctgtgaaccaactttctggacagccaccgccgcatctccatatcccgcgaccagacgtgcaatgatcatcgatattccggtaaacagcatactctgaacagacgttggaaaaccgattctgacaattcctttcatatgatgcagatccggcttcttcagatatcttacatattgaaaaagtacggtatccttcatcgcaaatataaaaaacataactgtaacgatcatctgcgcgattaccgtagcaattgctgcacctgtcactcgaagaaccggaaatggtccgattccaaaaatcagaaccggatccaggatgatattaacaaccagtccggtcgttgttgccagaaataccggcctgctgttaccgattgccgtaaataatccggtatacgtctgatttaaaaaggaaaacaagacaagaccgcaagtaatttcaagataatatatggcatcccggatcacctgtgcctgattcagatggaaaaaatgaatcagtggttttgcccctaatatacagacaagtccataaataatccccaaaatcaacgtaagctgtaacgcgttggatgcatattctgcggcctcttcactattagatgccccaagtgcatgtccgacattaacctgccctcccatttttgcaagcgcggcaagtccgttggaaagccacatatacattcctgctgccccaacagacgctaccgccgaacttccgatacggccgatccagatcatgtcggtcatattgtacgccatctggatcaatgacgtcgccatgatcgggacagccagtctggtaagagatgataatacaggtccgtttaccaaatcaattttcttttgcatgattggctatactcttttcaatactttcacgatctcgcccatatacattgtatgataatccttatccggataccatttctcatcattttccttaacatcgaaacattccggtttcatatcctgtgtatactgagtcttgcatacgaagatcagatctgcttcttcaactgcagttgttccgtctaccgcatatggatgaagacctgcttctttccatttatcttctacgtcttttcctgatacagatccgcatacgcttaatgcttttctgtaatcttctgacaggaaagaaagcgtgtacataccggtctcatccatgaatttcttcgtgtatctctgtgggcggatatatgcagttgcgatattctttccccacatgattccgacaccaccccagcttgctgtcatggtgttactctttttttcatctcctgctgttaccagcatccactcttttgaaatctttgtgaatgggttgaattccagactttcaattgctacttctttaaatgccatttccatatcctccttatcgtctttatgtactctcacaaaattaagtatgaaacagtagcaagagtacatctttgcttttagaattacagacagtgagtattcactgcctgcaattttactgtattcttttataattatactactttactaacactttacggaagtttttcttaccctttttcaggactacgccttctccacttaatgcttctccggcaaatgtctggaatacatctgtcaccttctcaccatctacagatactccaccctgctgtacggcacggcgtgcttctgacttagaagctgtcagtcctgattttactaacattgtcaggatatcgatgttaccgtctgtaaggtcttcttctgtcagttctgtctttggcatatctgctgctgcacctgttgagaataatgctcttgctgcctcctgtgccttctgtgcttcttcttcaccgtgaaccagttttgtaagctcgaatgcaagaatctcttttgctgtgttaagctgtgctccttcccagctgtccatcttgtcgatctcttctaacggaaggaatgtcagcatacggatacattttaatacatctgcatctgcgacatttctccagtactgatagaattcgaatggagatgtcttgttcggatcaagccatacagcaccactctgtgtcttacccatctttttaccttctgagttcagaagcagtgtgatcgtcatggcagaagcgtcttttccgagtttacgacggatcagttctgtacctgcaagcatgttgctccactggtcgtccccgccaaactcaaggttacatccgtatttctggtataactcatagaagtcatatgcctgcatgatcatatagttgaactcaagaaagctgagtcctttttccattctctgcttgtagcactctgctgtcagcatacggttaacggagaaatgtgctccgacttcacgtaatacttcgatgtagttcagtcccatcaaccagtcagcgttattaaccatcaatgcttttccatctgagaaatcgataaatcgactcatctgtttcttaaaacagtcacagttgtgctggattgtctccggtgtcatcatctgacgcatatctgttcttccggatggatcaccgatcatagctgttcctccaccgatcagtgcgattggtttgtttcctgcttcctgtagacgtttcatcaggcacagtgccatgaaatgtcctacgtgaaggctgtctgctgtcgggtcaaatccgatgtagaatgtagcctttccattgttgaccaagtctttgatcctgtcttcgtctgttacctgtgcgatcagacctcttgcaacgagttcttcataaattcccatttttattctccttttattatgttaatgatttacagaattctcactttacttcagcttgcaaatatgcttttcaggaagcgattttcccacataactggtcaaaaaaagtccttatccaatcaatattggataaggacgatattaaccgtggtaccaccttatttcgctgattacctgcgtattcagcctcattcaatctgcgtgttcacagacctttgcactataacgtgtgcccgacgtcacagcctactttcgaaaacactcataattcttatcgcgtatcatttcggtgtgcagctccaagacgtattcattcttcactctttcatgcgcctctcatcaaccggctgctttctgtatgggtgtgtgaatcactacttcttcttttccaagcctttgtgatatctgtatattattttcctgtctgtgttaaagactaactgatttgatgaactttgtcaagatgatttttaatctccatcttttattttttcaaaaagttgcagccatgctcctgcaattatttcatttccatattctgtcagatgaataccatccgttgtaacactctcatatcctgctttttctgctttcaatattatcatgtcctgaagcgcaagaaagtccgcatgatatttttctgcaatctttttttcgattctttctgtctgttttattcccggaatccagttttcatacattctgggatatggcactataaatggcgacatacagataagctttgcatccgattgctctgtaatttctttcacaatggcttcataacaggcttcaaactgctgttcttccaggctctttcctgtattcatcataactccgacgtcattgcatcctatcagaatgcttacgacatccggtcgttttaaaatgcattccttctccaatatacgtttcactccatgaatcgtgaatccatcatgtcctcgattcataatgtcgtacttcttccttccgccgtcactgtcattcaacttctcagccaccatattcacataaccgtttcccagtggattttctaaaaagcaatgactggcatctgtaatactgtcacctaaaaatataatctttttcatctgtccttaacaccaaatggccttatactataaattgcatgaattataattcctgtccgtccttaattaccatcttaagctccaaattctcgtctaataatacgatattcgctttctttcccggtgcgatcgaaccatatgtatcttcaattccaagactcttagccggattaatcgtcgcacatgcaatagctgtctcaagtgggatctccatctttttaactactgtacgcaggcagtcagcaaggtttgttactgatccagcaagtgctccgtcagataccagtgtcgcatgatttccaactacttttacatccagaccgccaagtgtatactgtccgtccggcattccggttgcacgcatgctgtcactgatcaggatcatgcggtctgctcccatcatcttgaacgctgctcttaccatagatgggtggatatgtacaccgtcacagataatttctgccattacatgttcactatctgatactgcacctactacacccggttcacggtgtgtgaatgcaggcattgcattaaagagatgtaccgcatgattcgcacctgcatcaaacgctgcttttgcgtgtgcataatcagcattcgtatgtgcaagggaaatattcaccttatctttcattgcttttacaaatgcaactgcttcatcactttcttccggcgcaagtccgacaaactttacgagcccttcggaagcatcaatgaatctctgacagatttccgtatcacaaggcatgatgtttctttcatcctgtgcaccttttttcaccggactgataaacggtccttccatgttcacacctacaaggtctgctcccttaggattctgctcttttttgtattcagctgccgttcttaagatcgcttccagctcttcgaccggaagtgtcatggttgccggtgcaattgttgtaacacctacagatgcctcatattttgcaatattttcaattgcttctttgctgttatcgcagaagtcatctcccatacatccgtggaaatgcagatcgatcagtcccgggattgcatatgctccccgtccatcgatcacttcctctccgatcatatccggtacattttctgttgtataaatattatcaattttatcatcgtggattacaataccacctgctgtaaatttcttatcttctgtataaacgattacatttttgattatcatttcagttatcctccaatttattctgtctatttccgcatatcattttatcattcatacgatgtccccgtgatatgtatttattttaataagctcctgcgaagcgcctcaccttcttccagtgcacgcagtgtattatcatgcagtacctctttttcatacttatcctgctctacataataagaatagataatatccagcatgaccaggattgggaactgtggtgatataacgttaccatggttcaaatgccgaagcgacggaagtaagagtacttccgaacaatattgttcaaaatcaccccggttattcgccgtcagcagtacggtttttgcacctcttcgataagcttcctgcagcaaaaacaataccgattcttttgtaccactgatactgattccgaacaccagacttctcttatcctgaaataccgcctgcatccgcatcatatccgtctccaccaatgaatcaatatccacaccgatacgcataaagcgaagctccatctcccttgcagaaagtcccgaacttcccgttccacatacaaatacccgctccgcctgattcagatatctgctgattcttgcaatctgagcttcatctaccagactgtacgtcttattcaggagttcctggtatgcattcaggatcatcctggtattccctgtaatagattcctgcttttcaacaaatgtttcttcatactgatagacaaattccctgtaacctctgtagccacatttttttgcaaatcttgaaagtgaagcttctgatacaaaaagtctttctgcgatagatttcgcagaaaaatctactttctttctgttctgtataaaaaaatctgcaatatttctttctactgttgtgaacttatcatagttggattctatgatcggtactactgattttacataatattccatagcttattatccctgttctgatcactggtgtcttccctggaaatgatagaatgctccaagcataccggcattgttctgattcttggcaaatgcaatccttgtatgctcccacatactggacaccagatatttttctactgctttttcaatcttatcttttaagaatgcttcctgtgccataattccaccgccaagtacaacaacttccggattcactacatagcagatattggcaattccttttccaagtacatccaccatctcgtcaattgcacggttacagatctcatcgccttttttcgcctcttcgaaaatgtgatatccgctccagttttcggttggttcttccttccacgcagctactttctttgtcaggatgcttgctgctccgagtgtctggaaatcactgtcatccatatgcatatatccaacttcacatgcactgttgctgaatccgtggaacacttcaccattcagaaggatacagccgccgattccggttccgatcgtcaacatcactgctgccttgcttcctgcagccgcacctgctttatactctgcaagtccggcacagtttacatcattttccacttcacatggaattccgaatcgttcttctactgtctttttaaatgccgttccgatataattcgggatcaacggtgcagaatagaagatttcccctttctcaatgtcaaccataccggctgtagaaatacacacacctgcgtctgcctcttcttttaatgcttctacgataccgatgactttatcaaggatcgccggtccgcctttctgcgcttctgtcttcatttctttctttaacaatacttctgcatcttcgctcacaataccatatttgattgctgtgccgccgatatcaatactaatatattttttcatttcttcttttcctctttcactatccttcattatactcgttaggccagaaaagggcaaaccgttctttcatggtttgccctcgacttttctgattagatctttactttgaatattgcctttttgatggcttccggttcctgaacctgaaccgctgttctgtgtccgtcacttggataacagatcaggaaatctccatctgtcaggactactgaagaattcttttctccatccattggaagaaaatcatctttttccacaaaatcttttaattccatattctgaatgaagttcagatcgatctgttcatttccatggatcattacatggacgtccagataatttttatgtgcttcccagaaacgttcttccggtgttgttgttgtatattctacgatattgacaaacagtctgtcaccatcgatttcatgacttcccttttcataagatgcaaggtcgtgtgtctttgcatattcaaagcactcttttacttgttcttctaagaatgggaattctgataaattattgatatttccaaaaatcacgaaaatcgtcactccttcttagtttttgtaaatggttgtgttaggagcaggtacggaattgtctccttttgcctttctccagatgatacttgccgggataccaattaccagtgatactacaattgagatgattgagtatgaccagattgatacgtgatcagcaggtacgaagtatttgatgtataccattacgcctgatgcaacgatgaatgcacatactgcaccaaatgtattggcaacctttgtaaatgctccaaggataaatgttccgatcaggataccaagtaccagtcccatgaatccattgaaccattcgtatgcagattttactccgccgttagccagtaccatagcaactacgattgcgaagataccaacgatcagagatacatactgtccgatctttgtctgtttctcaaagcttaattctttcttagaaagtcttgcctggatatccagtgtccagcttgatgctacagagttcagacctgtagaaagtgtagactgtgctgctgcataaatagctgctaacagaagtcctgttacaccaaccggaagctcaaatgcgatgtaagatgcgaagatctggtcctgagctgctgccggtggaagtgtattctgctgatagaatacgtataatcctgtaccgatcaggtagaatactgttgcgatgaagattgataatcctccgtttgcaagcatcattttgttcagtttctttgtatcagttgttgttgtaaaacgctgtacaatatcctggcttgatacgtaagatgccattgtattgaatccggcaccaacgatcatgatgaatacgctgtctttaaaaatgttagcattgaagatcggctgatctacagcaaggaacttatgctctgttgtcagtgcatgtgcgattgctccaaatccaccatctaagtgtgctaacaggaagatcagtgcaaatgtaacaccgatcagaagtacagatccctggatgaagtctgtccaaagtacggatttcagacctcctgtgtatgagtaaataatagcaatgatacccatgataatgatcagtaagtttacgctgattccagtcagacttccaagtaccatacatggaaggtacatgatgattgacatacgtccgatctggtaaatgatgaacattacagctccaagtacacgaagtcctttgcttccgaatctcagttccagataatgatatgctgtatcaatatccagtttgctgtagattggcaggaagaatttaatcgtgatcgggatagctaacagcataccaagctgtgcgaaccacatgatccatgttcctgcgtatgagtttcctgctaatgacaggaatgaaatcggacttaacagtgttgcgaaaattgatacggaagttacccaccacggtacagttccgtctcctttaaaatactcttttcctttcatttctttctttgcgaaatgaaggccggcgaacagtacagccgcgagataaattactaaaatgactaaatctactacggtaaacccttgcatcgtctctctccttacagatatttttctttcacgtattttttatataatcttacagatatttagcttttgcgtcgcgaaccatcttagctgcttcttcaacgatagccatgtcttcttctactaatgctggcagtggctctcttactccgccaagttccagaccttcgttgatctttaacatagctttgatcactgcgtacatatttccgtgtgcagagcacatcttatagataatctcatcacaagcatactggatttctcttgcttcttccatctttccggctcttacatactcgtctaatttcagatataattccggcataactccgtatgtaccaccgattgctccttcagctccgatgacacgtccactcatgaactgctcatctggtccgttgaagataatgtagtcagggcctgctgcctgtttgaacatctggatatcctgtaccggcatagaagagttcttaacaccaattacgttaggattctttctcatctctgcgaaaagtccctgtgtaagagctactcctgcaagctgtggaatgttgtagattacgaagtctgtgtttggtgctgctgcactgatgtcattccagtactgagcgattgcatactctggcaggtggaagtagatcggtgggattgctgcgattgcatcaactccaaggctttctgcatgtcttgcaagctcctggctgtcttttgtgttgttgcatgcaacgtgtgcgattactgtaagctttccttctgctgctttcataacgttctcaaggatgatcttacggtcttctacgctctggtagatacattctcctgatgaaccgttaacgtatacaccttttacacctttttctacgaagtactttgtcagtgcctgtacgccttccggacttacattgccttcgttgtcataacatgcatagaatgctgggatcacgcctttgtacttttcaagatttctcattgttttttctccttttcttttttgatatattgctttatctttttataatgttatcaataaatcctttagggaattatctttccatttcttccacaaatgattttgtgatcagctgtggtcttgtgataatagaaccgacaacaacgctgtatgctccaagttcgatcacgtgtcttgctttttccggtgtgttgatgttaccttctgcaatgactctgtgttttgcttttgcgacaatctttcttaagatttcgaaatcatttgcctcgatcttatcgcccttgctctgctctgtgtaaccaaccattgtagttccgatgaagtcaaatccaagttcatccgcatgcagtgcttcttccactgtagaacagtctgccatgaataactgatccggatattttgcttttacttctttaaagaactcatctaatgtctttccgccaggtctctttgaaatagtagcgtccatagcgatgatttcaggttttacttccatcagttcttcgatttctttcatcgttggtgtaatgtagatatcactgtcatcataatctctttttacgattccgatgatcggcagatcaacctgtgactggatctccttgatatcttcttttgtatttgcacgaattccgcttgcacctccctgttttgcagccagtgccattcttcccataatgaatgaagaatgtaaaggttcattcgataatgcctgacaagaaacgattaattttcctttcagattttcaactttctgattcattgttttgttccctccttcgttctgcaatcagtataatattgttcgattttattttcaagtgtctttgtagttgttgaaagctctttcattcttttcaattctcctatcctattttccttatttttcgccttttattttgtgcaacttgcacaattccaggtagtttctttccaattttgaaagtagtttctgttctttctatttcacttgaaaattcatttataatgtatatactggtattcagaaacaaaaaacaattgaataaggagaggttattattatggtaatttataaagcaaaagactatcaggatatgagccgtaaagcagcaaacattatttctgcacagatcattatgaaaccaaactgtgtacttggacttgcaaccggatcttcaccggtcggtacttataaacagctgattgaatggtataagaaaggtgatcttgatttttctcaggttacaagcgtgaacctcgatgaatataaaggactcagtccggaaaatgaccagagctacagatatttcatgaacaccaatcttttcgatcatgtaaatatcgataaaacacgtactttcgttccgaacggactggaagcagattctgacaaagcctgcagtgaatacaatgagatcatccgcaaacagggcggcgtagaccttcagcttctcggtcttggacacaacggacacatcggattcaacgagccaggtgctgcttttgaaaaagagacacactgtgtagatctgacagaaagcacaattgaagccaacaaacgtttcttcgaatctgaagatgatgttccaagacaggcctacacaatgggtattaaaaatatcatgcaggcaaagaagatcctcgtagtcgtaagcggagaagataaagctgcaatcttaaaagaagtattatacggcccaattactccggaagttcctgcttctatccttcagcttcacaatgatgttacgattgtggctgatgcagctgcacttagcaaaattaatatgtagatcacaggacttaccaccggcaagttctgttgtatactttggtataaaaaagcaggcgttctattgaaagaatgcctgcttttttatatctgtcttactgatttgactccgtacttttgatgcgtgcggctttttttctgcctgtaataaccaggattgctgatactatcacaattgtgcctgccagaagttgtgataccggaagtccaactttcggcaataaaagctgatctgttctgaggctttcgatccagaatctgccaagaccgtagcctaagagatagatcaggaagacctctccatcgaatttcttgtgtttgcggtatagcagcataatgatcagcaccatcaggcaccacatggattcatacaggtatgtcgggtgaacctgaatgtacatgaccccttttacggtctctgcatgattccacatctttgtagtaatgtctgagcttctgactgcatctaccggaagtctcattgcaaataagccatttgtatattcaccgaatgcttctcggttaaaaaaatttccccatcttccaatcatctgtccggtgatcagaccaaatccgccggtatcaaataaaagaaacggtgataatttttttatttttgcaaatatgaatactacaataattgcagtaattacaccaccgtatatagcaagtcctccctcacggatattaatgatgctcttaatgtcgtctttatacatatcccaggagaagatcacataatatgctcttgctccgataatcgaaaagattactccgtatattgccagatcataataatcctctacattctgatgtgtgcgctttgcttccattactgccagcatgagtcccgccaggattccaattcctatgacgatcccataatatgcaatatcaaatccaaatacggtgatatgatctccgacagattttaaatgaattcccagattcggaaaatcaattgttctgtgcatttctttttccctttcctttttctttatagatatgactttccagattggcagaaaagccggcacataccatgccagcttttctatttatacattttcttatgtgttttcagcatgcttagtatgcttatacattgaaacggaacagcatgatgtctccgtcttttaccacatagtcttttccctccagacggatcagacccttttctttggctgctgtgtgacttccgcatgcgatcagatcatcataagatacaacctctgcacggatgaatcctctttcaaagtcagaatgaatctttccagctgcctgaggtgcctttgttccttctgtgatcgtccatgcacggacttccggctcacctgctgtcaggtaactgataagtccaagcagtttatagcttgctttgatcagtttttccagaccagactcttttaatccaagatcttccaggaacatcttcttctcatcatcatccagttctgaaatctctgcttcgatctctgcacatacaacgaatacttcactctgctctcccttggcatactcacgaacagcctgtaccccttcgttattagccgcatcatctgccagatcgtcttcagatacatttgctgcatagatcactggtttgtaagtcagaagattgtagctttccagccatgcctgttcttcctcgtcatctacttcttcgaatgtctttgcaagctttccgtcttcgagatgtgctttaaccttattcagaagtccgagttcttttgctgctgatttatcatttcttgcaactttggaaactttggaaattcttctttccaggatttcaagatcagagaagatcagctctaagctaattgtctcgatatcacgaagtggattaatgcttccgtctacgtgtacgatattgctgttctcaaagcatctcactacatgtacgattgcatctacttcacggatattggcaaggaactggttcccaagtccttctccttttgaagcaccttttacgagtccagcgatatcaacgaattcaattgctgccgggatgattttttttgtgtgatacatctctcccagtacatttaatctttcatccggtacagttacaactcctacgttcgggtcgatggtacagaacgggtagttagctgattctgctccggcctttgtaagtgagttaaacagtgtactctttcctacgtttggtaatcctacgattcctaatttcatttttctatttcctcctgtgaatctatctgttttctctttttggcactctatgtctgatagtcttgccggtaatcattctcattccggcactcttatatcacaataaaaaagtcttaacacagtattttgtattataccatgctaggacttttttgtgaataattttgctttaaattctattatgaaaattttatctgtcttttgtctccatcaggattacaatccctttcatgaagctgatcgtaacttcatcttcctgaaactgattgcttacacacagactgtcataaggaatcagggtatgattatcaagcggatactttgcccccttaatactaaatccatatacctcttcccccaacgggaacactgaaaaatacggcccatatgtttcacctttcttcaggtgtgtctccccgcctccgatcagacggatcttattctgcgtatccataataacggcatcaatccctgctttaaatggaattgcaaggctctgtacattagcccagagatgatcaattcgccctccggtcgctccaaggatcaggatttccttagcccctagtgtcatcgcaagtcttattgcaatctctgtatccgatgcatcttttaccggattaaattcacgaataggaacattcgtctcattgcggtaataatcaccgatttctttttttacactgtcgaaatcgccaacaatataattcggcagtatctgatgtctgcaaaggaactccatacctctgtccacaccgatgacatactgattctcttctttttcaagaatcgataatacaaattcttcattcagttccccaccactgatgatgataatcctcttactcataactctttagtatctccataaattttgcagtattttctccggcatcccctctgaatacagcggagccggaaacaatcacattcgctcctgcatccagtacttctcttacattctctacatagacgccgccatctacctgaatatccgtctccagatttttttcatttaacatcgcacgaatcgcacgaatcttgtccaatgactctggaatgaatttctgtcctccgaatccaggatgaacacacatcaccagaatcatatccacttcttcaagatacggtacaacttccttcacatccgtctccggattaatagaaagtcctactttcattccgcattcgcggatcttattcagcgtagcttttacatcctcacaggcttctacatgtacagttacagaatcagcccctgctttctgaaatgcttccacataacggattggctcctgaaccatcagatgtgcatccatgaattgctctgtagcatcatgaatcgatgccataaccggcataccgaatgaaatgcttggtacaaacattccatccatgacatcaaaatgaatatattccgctccattatcctcagtctttttcatttcctgacccaaaactttgaaatccgccgccagtattgacggtgctaatacatagtttatcatcagtacctcctcttattcttcaattcctcatacatttctatataattctgataacggatcttatgaatctttccttcttccaaagcttcttttactgcgcatcccggctcatgcacatgatcacatccattaaaccgacacattccttcatattcccggaattccgggaataaatatttcaattcttctttttcataatcattgacgtacaatgagctaaatccgggtgtatccatgatataagaatcctcatcgatcgcgaatagttccgaatgtcgtgtcgtatgtttgccacgctcaatctttgtgctgatcgcaccggtctccatctcggcgtccggctgcagaatattgatgatcgaagattttcctacccctgacggccctgcaattgccgtcgtctttccttttagcaattcacgtattttttcaattccccgttcttcttttgcacttacgaataccattggatagccacatgtttcgtagatttcttccagttcttttatctgaggatctgttgcaatatcttctttattaaagcataaaaccaccggaatttctttgctttccatcatgaccagaaatctgtccaatagattaaaatgcggattcggttttgtgattgcaaaaaccaccaatgcctgatcgatgttagccactgccggacgtatcaattcattctgacgaggcaagatttttacgatattgcctttcttctcggattcatccagaacctctatctctacattatctccgaccagaggttttatcttttctttacgaaataccccttttgctttacattcataaacaccgaattctactacatgaacgtagtagaatccggcaattccttttataatttttccctgcatatctttttactgattaccaccgttatttccatcaccggaattctggccgttatttcctgaatttccggaattgtcaccattatttccagtgttattactatcttgtgattttgatccaagactgatcacataactgattgttcctcctttggaaactgttcctgaagaaggagtcatggaaataatacatccttttgcataactgtcactgtattgtgaatcagatatattggtataaagtccttttgacgatgcccagctcttcagtgctgattcctgttgaccgacaaaactctgtacttctatcttttcctccggtttcggtccgttacttacggtaatagaaatactcgttcctgcagaagcctttgttccaggttctactgtctgactgatgaccattcctttttctacactgtcgctgtaatcataagttacagttcctacattaaatccgtaactcttgattgtactctgtgcagttgcatctgccatacctcttacatccggcactgtcttcttattgcttccctgacttaccagcatcgtaaccgtcgaacctttctcagcttttgtacctgcttccggtgttgtactgattacttttccactttcaacactgtcatcatactggaaacttgaagttactttaaatcctgcctcctcaagttcattctgtgcctctgtctcactcataccactgacatacggtattgcctttttgcttccaactagtcctgaacttacaactacttcaatcttggtatgttttgataccttttctccggcttccggtgtctgttttgagatctttcctgccttatacttcttagactcttttcttgtcacaacctgaattccgagtccttttttattcagcagtgcctttgcattctcttcagacataccacggacatccggtactgtgaccttgcctgatttatcttcctcgtcctgagttgtaattccaccaaatgatttaaatacgcctgccgccttaccaacagtaaatacaaggatcagcacgatgatcgccacaactacgattgtaagtatcttcatgatcttatgcatatgcggattgacttcatctgcccctctgccattttcataattctcataatcttcgtcgttgtcatcatttccatacatggtatctgtatcatactcatctgtatcatactcttctgtatcatactcttcatcatcatttccattccggatatcatccagatctttgtctgtcatgataacggtatctgtcataccaccgattggagggatcactacaaaatccccatccggatcgaccagtgaatgcttcagatcctgaatcagagcccctgtactttcatatcttctctctgaacttttctgcgtacatttcagaatgatctgctccagactgtacggaatatccggtacgagttctgacggcggtgtaatctcctgctgcagatgcttcattgcaacttctaccgttgtctccccgtcaaatggaacctgaccggttaccatttcgaataaagttataccaattgaataaatatcacttctctgatcactgaatccgcctcttgcctgctccggcgacgtataatgaaccgatcccatcgcattcgtacttaccgtattggacgttatggccttcgcaattccaaaatccgtaacttttacctttccgtccttggaaataataatattctgtggtttgatatcgcgatggataattcccgatgcatgtgctgcgccgataccgctgcacatctgaatcgcaatactgatcgtctctttatgagaaagtcttccctttctctctatatattcttttaatgtaattccttctacgagttccataaccatatagttaaggccacggtcctcccctacatcatatacatttacaatattcggatgtatcagtccggctgctgcctgtgcctccgaacgaaattttctcacgaaattttcatcctctttatactgtttctttaataccttaatcgctacatatcggttcagcatctgatcccggcctttatagacatctgccattccgccggcaccgatcttactaagtacagcatatctcttgcctagtacgattccatcttttaccatacactcacctcatcagcaagtggctctgctacgataacccctatattatctctcccgccattgctatttgctttttctatcaacatctgaacagcttccactacgtctctggaacctttgacaatattgaacatgtcttcatcctctaccatattactgaggccatctgtacacattaatatcatatcaccctttttcagacgatattcataaatgtccggttccacatcttcttttacaccaattgcccgtgtaatgatgttcttatccggatggtttcttgcttcttctgctttgattccaccaagtcttaccatctcttctaccagcgagtgatctttggaaagctgacggatcttatcgttgatcaggtaaagtctactgtctcccacattggcaaagtacaatgtattgccaacaacagttgccgctaccagtgtcgttcccataccttccagttttatatctcttgaagccgcctcgattaatttatgatttgcaatactgactacgctccttagaatctcctcgggtttatccatcggtgtcttcttcagttcatcttttaatacatttaccgtataactggacgcgaaatctcccgccttatgtccgcccattccgtcggcgaccgtaaggagatttggaaatggtccaatcggtctgtctgtcacatatacatagtcctgattgacctcacgtcttcttcctacatcagtcattgcataaattttcatctgtctctccctcgcttttggctgcgtgtctgcgacgcagctgtccacaggctccgtcaatatcagagcctctttcccttcttatagtaacattaattccgtttttttcaagtttatttttaaattccagggcatttttgcggtccggctttttaaaatctctttccttgatcgggttcaccggaatcagattaagatgacaatttcgcccttttaaaatcgtcgtaagttcccggatatcgtccggctggtcattcactccggctaccagactgtactcgaaagtaatccttcttcctgtcttgtcaaaataataatcgcaggcatccagtacttccgacagatcgtatttattcgctaccggcatcagtttcttacgtttttcctgactggaaccgtgaagtgaaagtgccagtgtgatctgaagtccttcctccgcaagccgtctcatattcggaacgattccacaggtagacgccgtaatatttctctgactgatattcagtccgtgctcatcactcaacatatggataaactttacaaaattatcataattatcgagcggttctccggttcccatcacaacaacattcgaaacacgttctccggtaatcttctggatgtgatagatctgccttaacatctcagacggctccaggcttcttaccagtccaccgatcgttgaagcacagaatctgcaccccatacggcagcccgcctgtgaagagatacatacggaattgccgtaattatatttcatcagaacactttctaccatattaccgtcttccagttcgaataagaacttctccgtcggatcttcttttgatatctgatgatcgatcatcttcactttgcggatctcataattttttttcagtttctcacgtaaggcttttgacagattcgtcatttcatcaaaatcatctgccagctttacatgaagccattcatagatctgtttgctccggaatgccttctctccgattacaagcatctcttcttttaattcatcataattataggaacatatatctttcttactcatggttcaccctttttattattgctatgtagaatccatctcctgcatctttacccggaatcatctgtttgtctttcaccagttcaaattccggatattctttcaggaaccattctacattcccctcattctcttctctgtgtatggtacaggtactatacagaagcttcccgtccggttttacataatcctttaccaccgacaggatcttcctctgtaattccaccaagtcagcttccgtcttttcattcatcttataacgcagatccggtttctttccaagtacaccaagtccggaacacggaagatctgcgattacaatatctgcactctttttcttatccggatcatacacggttgcatcctggcatactgcctcaatattggtaaggccgcttctttcgatgttgtcccggatcagatcgactttatattcagtcaaatctcttgcttccacatggccggttccgttcagaagttctgcgatatgtatggattttccacccggtgcggcacacacatccagtatctggtctccttctttcacttctgaccataatgctacctgcatagaacttaaatcctgcacctgataaagtccttcgcagaagcttggaagtgcggacaggtgatcatatcctgacagatataatgcacacggaatctccggcacttcaccaaccgttacaccttcttttttcaggattccgaccagatcttcttttttgatcttatgttcattaaaccggactgttaatggcttttcttccagaaatgcacttccgattgtctttactgtctcttcgtcgtatacgttcagccattgtttgaccagccattccggcagcgaatacttcacggaaaggtaagacaccttatccttctcatccggatagttaatcttgtcaagattcctgctgatattgcggagcactccgttgacgaatcctttcagattcacgaatcctcttttgcctgcaagcttcaccgcttcattacagattgccgaatccggtacgctgtccatatatttcatctgatacaccgaacttcttaagatcgttcgtatcaacggtttcatcttatttacttttacctttgaaaacagattaatgatatagtcgatctcaatcatgcgttccagggttccatttaccactcttgtgataaatgcacgttctcgtttgtccagatactgatatttatccagaacattctttataacaatatggctgtactcaccgtctctcgtgatctgaagcagcatgtccagcactaattctctttcatttacagacgcctgcatacgtcccctcctcttcccatagatatacaatcagggaagcggtttatatccccttccctttcgttaattaatcgtttcttcgatttccagtcagaagcagtatacgcagaagctgcagaattgcagatgctgctccggctacataagtaagcgctgccgctgtcagcacctttctggtatctctgacttcatcctcatacaacatgcctgtattaccaaggatctttaatgctctgtgcgacgcatcaaattccaccggtaatgtcacaatctggaataacactgcaagtgaaaatgcaaggattccaagattgatgaacagtgaagaggtcgtactgctgttgaagaaaaatccaaggataattaacggccacgcgatcgaacttccgaaattcgccaccggcaccaggctgcttcttaacttcagcggcacatatcccgtcgcatgctgtactgcatgcccgcattcatgcgctgctacgccaagtgctgctactgatgtagaattatacgttgcatccgaaagtctcagcgtctttgttcttggatcataatggtcagtgagattgccggaaatatgctcgatccgcacatcatacagtccttccctgtgaaggatctgctctgcagcatctcttcctgtcataccggaatgattccttactctggaatatctgctgaatgtggaattcatcttcgcagatgcaatcaggcagatcacgacaccaatcagcactaatatatacgttggatcaaaatacattggataatacataattatcagcctccttgctctctatgacctgcattatatatgaaaatttccccaaatagcaggttttcatacatttttaacaattcttaatcatttgtgaagaaagttcacatcctgtttcgatctgataacctcgtaagaaagcgtccgcttccattctcttctttccagggatctgaagtaccagtactttcagaagtccgtctcctgtctgtacagaaaatccgtctttttccactttcacgattgttcccggggttgcatcggtattctcatccagaacttttgcttcccagattttcatgactttaccattccagtctgtgtaagcactcggccatggattcagaccccggatcagacattcgattgccttcgcagacttgctccaatcgatatctccgagctttttgtccagcattttcgcatatgctgtcgggctttctccctgtgtttcccacgttgcagtcttatcttccagtgcctttaatgtctcaacacagagctttgcacctgctttagcaagcttgtcatgaaggcttccgcctgtctcatcttctgccagtggcacttctgtcttcatgatcatatctcccgtatccaggccttcattcatctgcatcgtcgttacaccggacactttatccccgttgataactgcccactgaatcggagccgcaccacggtaacttggcaataaggacgcatgtacattgatgcatccgtatggtgtcatctcaagaatttcttttggaaggatctgtccgaatgcgataacgaccatgatatctgcattatatttgcgaagttcttctacggcctgcgcttctctgatcttcaccggctgaaagactgggattccatgtgccagtgctgcttctttgaccggtgtatactgcatcttgccgccacgtcccttcggcttatccggctgtgtgactgcaagtacgacttcatgtccggcttcgatcagtgcttccagtgttccgaccgaaaagtccggtgttcccatgaatattactttcatgctattcttcctcctcatagttcacgtcatgtacttcaccctctaccagtctggtatataacttaccatccagatggtcgatctcatgacagaatgctcttgcaaggagaccttctccttccaggatcacttcttccatatcttcattcaatgcttttactttcgcataattcggtcttgtcacgattcctgcttttccaggaaggcttaagcatccttcttcgcctgtctgttctccggatgtctccaggatcaccggattgatcaggacgatcggtccttctccgatatcaatgactacgatacgcttcaggatcccaacctgtggtgccgcaagccctacgcccattgcttcatacatggtatctaacatgtcgttgatcagtacttttgtgcgaagcgtcatcttcgttacttctttacattctttattcagaacttcatccccaaattctctgattgttctaagtgccatctcttttgtctcctttatcttttaaaaaatattcatcggattaaagtcaaactgtatcctcatgttcgcaaatcctctgttgatctcgatatagcgttccatatggttcttgatccgcacaagcacctgatattcctcacttttcagatatatgactttccggtaaacgtcattgacttttccaaccgacggacttgccggtccgattacctgcacttctccgtctgcgcttacccggattgcatatttcttcagatattctgctgccgttgtaagcttattttcatcagatccggtcatcaggactgccatcagctgtgatgccggcggatatcccatcagatcccggtaattcatctctttttcatagaagccttcgtaatcctgtctcgctgccatccggatactgtaatgatccggactgtaagtctgtattattacctcccccggacgtctgcctcgtcccgcacggcccgccgcctgtgtcaggagttggaatgtacgttctccggaacggtaatcatccgaatacagcgacatatctgccgccagaacaccgaccagcgtcacatttggaaaatcatgtccttttacgatcatctgtgtcccgatcatgatatctgcttcttcatctgcgaatttcgccaggattttctcatgtccgcctttgttcttcgtggtatccatgtccatccgaagaacccttgcctgtgggaattcccgcttcaccagatcttcaatctgctgtgttcccgcccggaaacctccgatatacggagacccgcacaccggacaattcttaacagtctgtgtctcatacccacagtaatgacagaccatttttccgccccggtgtaccgacagtgatacatcacagtgaggacattttactacatatccacaggctctgcaagaaacaaagcctgcgtatcctctccggttcaggaataacattatctgttccttcttctccagccggtcctgcatcagtacttttaaccggtcacttaagatagaacggttcccatgctttaattcttcccgcatatctgccacatatacttccgggagtgcctgcttcccggtgcggttcctaagcctcagcatctgatatctgccacactcacacgcataaaatgcttccagagacggagttgccgaaccaagtactacacttgcgccctccatccgtgctctttcgattgccgtctctcttgcatgaaatctcggtacctgttcactcttataagtcggttcatgctcttcgtcaatgacgatcagtcccagtcgttcgaacggtgtgaacagagccgatctcggaccaatcatgatatcgacttcaccttttttcacacgttccatctgatcataacgctctccctgtgacatcctggaattcaggatagacacccgtccgccaaatcttgtgtagaaccgcatcacagtctgataggtcagtgctatctccggaatcagtacgattgcctgtctgccctcacttagaactttatcgatcatttccatatatacttctgtcttgccgcttcctgtcaccccgtataacagataagtcttacggattccctgctcataatccttcgaaaatgtccggattgccgcctgctgttcttctgtataaatgatttctttttgttctttctgctgataaatcacagggttacggtatacttgttccgattccagtgccagaaccttctgctcttccagtgcccttaccacacttctcgtcagattcagcttatggatcagaaaatcataatcctgttccggctgatccagaagtgccgccagaagtctggctcttgctttctgattcttgtgcagatacagttccagcttttcttttccctctgcttccggcaaaagaagccgtaccttctgcttttcctttgctttttctttcttcttgatcggaagtaccgtcttcagtgcctggatcatcgttcccccgtaagattccttcatccaggccgccagtgcaacaagtttactttcaatcgccacactttcttcggcaatttttaagacctctttcatcttctccggtgcatactccgcacgttcggagaatccggttacatagcctttgatttctttatttcccatgccgaacggaactacaacttccattccaaccttaagcatcccctccagatgagaggggatgcggtattgaaagactttatctaatttttcatgcgtaatatcaacgataatatcagcgtacatttatttctttaattcctctaatacttccttgatcagaacacgttcgtccatatcgtgtttcacacccttgatttcctgatatgtctcatgtccctttcctgccagaatgatgacatctccaggctggccgtgttcgatcgcatacttgattgcttcttttctgtcacagatcgtgatgtattttccatctgtcttcttcattcctactacaatgtcatcgatgatcgcctgtggttcttcaaatctcgggttatcagatgtgatgatcgtaaagtcggataatttaccggatacttcacccatctcgtaacgtctggtcttagatctgttaccgccgcaaccgaatacggtcacgattctttccggatgataatctcttaatgtatccagaagactttcgagtgccatggcattgtgtgcatagtcgatcatcaatgtaaagtcatcagatactttgatcatctcgatacggcctttgactcttgcaaccttcagcgccttcttaatatcttctaccggcacaccgaaatgtctgcatacggcaattgctgtcagtgagttatatacactgaagtctccgggaatgtcgatctctacatcaaagtccataagtcccgctacatgatactgtactccaaggtatccaggtcttgagatgtgctttacatccgttgcacgaatatctgctttttcagaaaatccaaatgtttccactttgcatgttgcgtctttgaatatatcttcgaaccatttatcatctacattaccgattccgatcttacactgcttgaataacagactcttacaatatttatattcattgaaatctttgtgctcattcggtccgatatgatcttctccaaggttcgtaaagattccgatctcaaatggaattcctgcggtacgatccagtttcagcccctgtgaagaaacttccataactacacattcgcagccttcttctaccatctctgaaaaatatttctgaatggtataagattccggcgttgtattatttgccgggatactcttatctccgatgattgcctcaatcgtaccgatcagtccgactttgatgccgacttcttccagaatggatttcaccatataggttgtcgttgtctttccttttgttcctgtgataccgatgactttcagcttctctgccggatatccgaaatatgctgccgaagttaatgccagtgcgtaacgggtattctctaccttaatgactgtcaatccttccggtgcttctacatctttttctacgatcacagccgctgctcctttttccgcaacctgctgtacataagcatgtccgtcggaaaccgctccgctgatgcatacgaacacacttccttctgtcactttacgggaatcgttgatcagttctgtgacttcaatctggtcgtctccctgtactacttcatattctaaacgttccagtaactgggttaatttcatctgattgcctcctattttcctacaatatcataagtataccatcatttttccatgcagcaaaggaaaaattatgttatagtaatagttagaatattttgaaaaaataagaaaaggggaatgtaacttatgaaagcttatgaaagattactgaaatatgtcgttgtccgtacaccaagtgacgaaaacagcgaaactgtaccatcttctgtatgccagttcgatcttgcaagacttctggaagcggaaatgaaagatcttggactgacggatgttgttctggatgaccagtgttatctgtatggcaagcttccggctaccgcaggtctggaggacaaaccggcgattggattcatcgcacatatggacactgtatctgattactgtgaccatgatatcaaaccaatcgttactgaaaattatgacggtggcgagcttaagcttggaacaagtgatactgtattaagtcctaagaacttcccacatctggaaagtcttaagggacgtacactgatcacctccgatggaacaacggttctcggtgcagacgacaaagccggaattgctgagatcttaactatgatcgaacgtgtacaggaagaaaagattcctcacggacctctgtgcgttgcatttacaccggatgaagagatcggtaccggtgcttctcacttcaacgtagaacagtttggtgcagactatggatacacactggacggtgataccgaaggtgagatccagtacgagaacttcaatgcttgtaaggctgattttgtgatcaaaggattcaacgtgcatcctggctcttccaaagataccatgatcaatgcaagtcttgtagctatggaaatcaacaacgcacttccatctatggaaacacctcgcggaacagaagactatgaaggattttatcatctggtaagtatgtccggagaagttgcggaagctgaacttcattatatcgtaagagaccatgacaaagatctctttgaagcgaagaaaaaaactttaaaattaatcgagaaagacatgaatgaaaaatggggcgaaggtactgtaacacttaccatttctgaacagtaccgtaacatggctgagattatctccacctgtatgcatctgattgacaatgcgaaaaaagcatgtgaaaatgcagatgtgacaccacttgtacttccgatccgcggcggtacagacggctgtcagttaagcttcaagggcctgccttgcccgaatctcggaacaggcggacatgcttatcacggcccttacgaacatattacagttgagggtatggataagagtgtggatgttgttacagagcttgtgaaattgtatgcaatgtaaagattttctttttaaagcaagaagacctgccggtaatcggctggtcttcttgctcttttatgtctcttctaattttttactgtcttattttacagttcaatatccggaagttcttccttgaatccttctcctactacttcgttcgattctacgataatagtgaatgctttcggatcgatggtatgtaccatcttcttaatggtatacatctgcttgttattgcaggcgcacattacgacatctttgtctttctttgaataacttccgattccttttaagattgtagatcctcttcctgagtaagcgtcaatctgttctgcaatctcagcacctttgtcggttacgatcagggtcatcttaccttcatcgataccgtacatgattctgtccattaccattgccatcagataagtaacgacgacaccgtagatcaggccgtctatatccttgaataccagtgctgtgccaagaatgatagtacaaatatcaaggacaaatgtaataattccaagcgtaatatgtggttttactttcttgattgccacactgataaagtcctgtccacctgttgaagaacctctcatgaagatcatggcatatccgattccgcataatacgcccatacacagagctgccagcagtctgcttccgtcatagaccggaaacagtggtgctacgtagtccatcagtaatgatgaaatgatcatcgatttcatggactttaagaaaaattcttttcctaaaaatttataacagaagattgcaacaggtacattcaagatgatggttccggcaccaaccggaaggccaaataagtgatacagaatgattgcgataccggaaaatcctgctaccgggaaatctgcattcaatgcaaagttgtaaataccaactgcgatgatcatacctgctacgatatccacaaggatatcaatgaataattctttccaatttacatttttcatttccattcctcctagatttattttttaatctttgtggacatatctctcacgaccaatgtcttttgatgatgtccgctttatttataaacaaacaaagaaagcagccacaaattatatgtaaatataattcgcaactgctcttatgctcataactatatcaaatttcattagttttgtcaaggatttttcctacccagcaatttcaacacggtctttcccactcctgactcctcattcgtatattcagtaatatgcgctgcccgttctttcaattccctggtaccattcttcattgcataggattccgggaactgatctatcattgacagatcattccatccatccccgaatacaaccacttcttctgactttatatcatagtattctgcaacttgtttcaacataattcccttttgagcctttggtgcggtaacctccatattatctgcaaatgaagataatacgctaagtcctgtctcttcaaaaatctcctgcttaagtctttttatcttttctgtatctttactgaaacatagtatctttcttatcttgtatttcttttcaaaaatctgctgccatccctcttccagaaaatctgcatatttcatctctttcgtagtcgcataatccccatgatccgtattgatctcgaactttatcccctctgcatccagttttctgcacacttttgctgccttttcaggatccatatcctccgcaaatatcagtcttccttcttcatcccgaaattctgccccattcattaatacatatccacagttgatcccatactgttgcataagcggcattgcacctctgtaagatcttccggttaccgtcatccacctgactccctgtccctgcgcggtctctactgccttagcatttatcccggatactgaccagtcatttttcaacattgttccatccagatcagttgcaatcatctttatcataatctgttccttccttcatcagatactcctggatcgctttcagattttcttctttcaacaagtaatccacgtatataatttttgtcttttttggaaactctacaccatatactctggaacccgatattaccagatctaccggaaccggatccagtctgtactccgccagagacatcttctccagaatgtgtatcttttcaccacagtaatctgtaatctgccttgccatattatccgcaaagctttcaccaatgtcacataaaataacggcttttaatctctggaagtcatatgcctttaagtaaattgcaacataacagatctcatgtacattggctataaattgatatttttcctgcagtatctggttcagttcttctgccatccgcacttctcgttcgtaatattccaatacattttccagtgtcggatttgtctcaaaatatccctgttctatccgttctatcatctttccgatgtgtacagacagtctcgtgaataattcttcattatttctgtaatctgtatgatatttccggtcaactatttcaagaaattctttcgtaatctctgtatattcttccggaacttcatacgtttttccctgtgtgtacaatattctttttgctctcagacactctgccatataactgcgttcctgctttggaatatcatattcctttttttcaagaaatctgcatatttcttctacacatggccaagtctcataatctccggcatcttcttccagttcaaatcctttttctctccgcataagactgacaaatatatccagggcaaacccttcgattgctttatctattaaccgatatccgtattgttgtaatatcgccggaagtgctttatatagtgcaatataatcttcatatttttcacttccaaacaggaacgtgatcacacgttccatcaatatcgcaccatacgtataatagttcatgatctccgccagggcatgtctgcggattttttccggacccgtaattcttgaccccttactgcttacctctatcgtcagtccatggtaccatctgcatgcatcctgtatttctttcttggtctgcagcattgctgttttagatacaaataatttttctgctgtccgttgtatagaaatcgggcgcttttcaaaaaacaaagtggtaaatccaaataaaaatctttcatccggcgtctccggcaatattacattcttactcttcctgatcatacgatccaggaccttctgtacattttgtttttcttctgctttcagataataccctccagtattagacgaataaattccaacattctcctgtctcaggatttcattaatttcttttacttcgtttcgcaatgttctctggctgatatctaatttatccatcaattcggcagacgacattctttcatgtccaagcaacgccctgatcagctttatctttctattatacatttactcaccctggttcgtttcttctactttgattttttatccgaccgtcagttccattctctgaaagttccggccgtcattactaaccaatattgtatattcccctttttcttttgtccagccctttcccggtatccagcgttccagtgtcttttcttctatcggaataacgatttctttactctttcccggctgtaattcaatttttttataagccacaagttctttcaccggccttgcgaccaaagattttttcttcccgatataaatctggactaccgtttttcctgtcatatttccaagatttgtcaccttcacaggtaccaggtattcctgttcttgtctgacaatttttccattgacctgtacatcatattccgtgtaactcaagccatatccaaatgaatacaatggttcattcggtatatccagatactgtgatttatatcgtggttcctgcaccagatcggcttttgggcgtcctgtcggagccatatcataggacacagggatctgaccgcttccatatggaaaactcatcgccagttttccggaaggattcttttctccatacagcagtgctgctgctgcattgccgccttccgttcccggaaaccacatttccagaactgcatctgcatattctttcacctttcttaagtccaatggacgtccattaaacagtaatactactaccggaatctgatgttcatgaagttttttcaaaaggctgatctgatgttccggcagttcgatcacagatctgcttcctgcttcaccggaccatagctctggttcaccaagtgccagtactactacatctcccgatgctacagtctgtacgatacggtctgaatcttgttctgtcacttcttcatatgcagtctgaatcacttcctttatccggccgccctttaaaataagtccgtcttttactgttatggcatcttctacgataccgtcaaccgaccacggacccagaatatttttactttctgcatatggtccggtcagaataaccggcgtctctttcgtcagtggtagaattccgttattttccaatagtacagccgactctgtggccgcatggaatgctgccctttttttatccggacttcgaagttcccgcatttcccgctctggatcaactccgcggtatggatcttcaaataaccccagttcgtttttcaagatcaggactttttccaccgcttcatctaatatagcttccagatgtggaaatttcttaacatatacttctatgtgttttactatggctgctgtcgccatctcaatctgtaccccggattccagagcaagtcttccggcctctgcttcctcttctgctacaccatgcttgatcagttccagtaccgccccccagtctgaaatcacggttccctcaaattcaagatcttttcttagtatatcctgcaaaagccatggatttgccgtcgccggaattccattcaatgcttcaaatgctgccattaccaatttaactcctgcatcaatacaagccttgaacggaggaaaatatttatttctcagacggaattctgatacatcggaagtattataatctcttcccccttctgccgcaccatatgctgcaaaatgtttcacacatgctgccagacggtccggatccttcagattttccccctggtatccttctaccatcgcttttccaaagtcacaatttaatttactatcttccccaaagctttccatcacgcgtccccatctcggatctcttacgacatctaccatcggggaaaatgtcacttgatatcctgcggcacttccttctttcgcagatattctggcacattcccggaccattcccgggtcaaatgatcctgccatagccaacggtaccggaaatattgtctgatacccatgtacaatatccgtcataaacatcagcggaatctgtaatctgcttctttccagattctccttctggatatttctcatagataccgcatcaagttttcccaagatgctcccacacagccacttcttttcttcactgatcccaagctttgtctctgttccggtcagctgacttccctgaattgcaaaataccgggaaggtaattgcgttacctgcccggctttttcttcaagagtcatctgccggataagaacttttatttgattcctgtccattttactcttccttataattctgtcttcattttttattctgcttctgcaacatcctgtttcattccgaagaaatatgtaagtacaaatgcaacggcgaatgcaattacatttaccagaatgtaaagcggcatctgtttattcagatataagagcattcccggaataccagtgatagacattcctgttcctttcagtccgagaagtgctgcgatccatcctccgacgccaccaccgatacatgcacatacaaaaggctgtaccagtcttaagtttacaccaaatactgcaggctctgtaattccaagtaatgcagagattgcagaaggataacctaaggatttcatttttgttgattttgtttttactgcaactgccattgctgctcctgcctgtgctacaataccgcaagaacctaccgggtttaccggattccattttgtttttgcaagcatctcaatctcaacaagattcaacgcatgatgtacaccggttacaacaattacctggcaaagtgctccccagataaatccgccaattccgaacggaaggctgaacaatgcagatacgatacttaccagacctacttcaaccgaatggaaaattggtccgacaataaaaagtcccaggcaaagtgatacaagcactgtaacaaatggtgtcacgattagatccagtgcattgatcacatgatcatgcagccattgttcaatcttagagcctaagaaaccaacaatgaatgctggtaatacagaactctgatatccattgactttaataaatccaaagaagatcagtggttttgcatttccctgagccacatcccatgaagttggcaaaatactgcttacaagcatcaatccaattacaataccaagtaccggagatccaccgaactttttgaatgcagaccagcataccagtacaggcagaaaaccaaacgctgtatcagttaaaatctgtgtaaattccaggaactgttttggaatcgcatctgctgaagttccaaagaatgcaagcagtgcatcctgtgtcaggaatcccctcagtcccatgaaaagtcctgttgcaaccattaccggaatgatcggaacgaatacatctgcgaacacacggatcaactgctgtaatttatttcctcgttttgcggcagcggctgcctgttcattcttagaggaaccttcaattccaagtttcattacttcatcatatactttatttacaatacctgttccaagaataatctgatactgtccagccgtgaaaaagcatccttttacaatatcaattgcttctacctgtttgtcatcaatgatttccctgttttttacaatcaggcgtaatcttgtcgcacagtgcgcaacagaaatgatattctcaggtccaccgacaacttcgatgatctgctgtgcaactgctttataatctgtctcttttgccatcattcttcctccaataaccatgttttcacttttatctgcagttcagaattcatatggatcaacgtatcctctgtgaaatacgacttcatagtcagtactttttcaccctgattcaggaatatctctgccgtagactgatccagatagattctgaaatcttccagtttatccagatggatctctttctcatcatatccttctccattccacttctttctgaaaacaagcagatttcccgattctttcttatataagaacttgatcaccttaccaaaatcaaatgtgatcgtctgattttccagaccctctgccaatatctccatgcactttgagtgtctgtcgattgcaatctctccggttccacaaatgctttcttcgttctttctcagatgttttaattcttctgccggcttctgatacagccggtcgttcttcacatatacttcccgcggtatcgtaagcacatgcagccatccttcttttacggtcggctgactcatctgatattcaatctctcctgctccgatccatcccatcaaaaggcgtcgtccactttcatcagtaaatgtctgtggcgcatagaaatcgaatccctcatccagaagtacacctgtgtcttcacttatatggaatcttccctgttcataatccattattccggcaaataccatccctttgcatccgtcttctttctgacggctcacaataaggaattgtctttctcccatgtctgccagatccgggcattcacacatatacccccaatccatggaagaatccagcatattacctttccactgccattttttcaaatcatccgaaacaaataaagctacatttcctttcagctcttttgtctgtgctccgacaaccatccaccagcggccattcttcttccatacttttggatctctgaaatgtggtgtatagccttccggaagatataccacaggcccttccttatgaaagttcactccatccgaagaacttgccagacactgataagtttccctgccgccttcggaatctctcacatttcctgtgtaaaacagataatagctgtctccttctgtaattccagaaccagaataacatccattcttttcataccactcttccggtttcagcccacatccctgatccgaccagtgaatcagatcttctgacacgcaatgccgccagatcttatttccctgcggtacaacatccggaagccattgataaaatacatgatactttccctgaaactgtgccagaccatttggatcattcaaaaatccatgtttcggtgagatatgataatttggtctcattcccatattcttgctcctttctgatctgcatcgatctgatatcgttatactaccccacttttcattcgaaaaaaagccgtgtttttgccatgcggttgtgcaaaaatgtgaacgcttcccttcttgtccttccgcaggaaagcatttaaactcttagtagcagaaaggacacaaaggtatatatttatgaacattttaagaaaaggatttatctacggcggtgactacaacccggaacaatggctggaccgcccggatatattagaaaaagatattgtacttatgaaaaaagcccggatcaatacggtaactttgggagtattttcctggtccgtactggagccagaggaagaccattatcattttcaatggctgattgatacgattaatcgtctatacgaaaacgggattcaagtcattctcgcaactccgtccggagcacgcccacgctggcttgccgaaaaatatccagaagttctccgggtccgcgaagaccgagtccgttaccactacggcgaaagacataaccattgttatacttctcctgtttacagagaaaaggtacggaaaatcaaccggaaactcgcggaaacgtttcggaatcaccctgccgttatcatgtggcacatttccaatgaataccgcgacgagtgtcactgtccattgtgtcagaaggcatttcgtgtctggttaaaaaagaaatatcatacaatagatgctttaaatcacgcctggtggactaccttctggagtcacacttacaattcatttgaccagatagaaagtccgtcttccatcggcgacaaaggacttcatggcctgaatctcgactggaaacgtttcgtcacagaacagactacagattttatgtgtcacgaaatcactgctcttcgtgatgccggtgccatgcagccgacggtcgtgaattttatggatgattataaaggactgaattattaccggcttgcccagcacgtagactatatctcctgggacagctatccggcctggcataaagattccgatatccataccgcatacgataccgccttccagcatgatctgatgcgaagtatgaagcagcagccattccttcttatggaatcctgcccagcaagtccaaactggcagaaagtaagtaaagccaaacatccggggcttcttatgaatgcaagcctgcaggcaattgcacatggttcagacagcgcacaattctttcagatccgcgcaagccgcggaagttttgaaaagttccacggtgccgtgatagatcattacggcggagatgacacccgcattttccgcgaggtaacagataccggtatcgcattacaaactttaaccgctgccgacgtcccggcctcttccgtgcatgcacctgctgccgttctctatgatatggaaagccgctgggctatggaagatgccaaagggccaagaaatgagggacttttttatcatgaagctgctctgaaatcttatcaggcattccgtaagaacggcctgaacaccgatattatcaacatggatcaggatctgaccggctatcagatcattgctgctcccatgctttatatgttccgttctggcattgaacaaaaattaagaacatttgtacaaaacggcggcattcttatcatgacttactggagcggcatcgtaaatgaaaccgatctctgccaccttggcggaaccccgcatcatcttatcgatgtacttggtatccgcagtgaagagatcgatggattatatgataatcaatgtaaccatatggttcctgccagcaataattttatgacattgcctgccacctatctctgtacacatctgtgtgatcttgtacaattaaaaggcgctgttcctcttatgcagtatgccgataatttctatgccgggtaccctgcattaactgttcacaaatatggagatggccttgctttttatctttgtgcagacgccgaagatacgttttattatgatttttacagacagatcatccaggaacaggagctcccggtcatcatggatcacattccagaaggcattgaggtatccagcagaagcagcggccgccaggaattcatctttgcccaaaactataccgattcaccaatcccattcacactgcccgggcatgcacagatcttgtttgggaaatacgatggaacgatcaaagaatacagcacacttatttatcagatggaggtaaaatcatgagtttatttaaaagaaaatcaaaagacaccggaaacgatgtatacgcatttatatcaggaaatacaattccgatcacagaagtaaatgatcctgtattttctgcaaaaacattaggtgacgggcttgcaatcattccttccggggaacttatctgtgcaccttgcgccggaactatctctatggttgccgaagggtcaaatcatgcggtcggcatgacattagcaaacggagctgaaattctgatccacgtcggattagataccgtgagtctgaatggtaaaggcttcaaaatccttgtaaaagagggacagaaagtaaaaccaggaacaaaacttttaaaatttgataaatcatttattgaatcagagggatttgacacggcatgcgtctttgttcttacgaattgcgaagacttcccggatgtcagattctttaccgggcaggatgttgttcagaacgaaactgttatctgtagtttttaaaataaatacggggatgggattgctaccatccttttttcacaatcccatccccgtattttccttctaatttctttaatgcctcttttaagtttttctttttcttcctcatctcttcggattcgaacttcatatcgaacagactcaactgctccggttcgctttcttccgataacttggacgtccggattccaagaagtctgataggttccccgctccacaattcgcggaacagttcgatagatgcctgataaatatcctgatcctggttcgtctgtctctccatctgtttctgatgagacacctgattaaaagtgtggtacttaatttctacgctcaccattccggctttttgtccggcttttctcaaccgtcgtcccacacttacagccagatctttcaataccggcaatgcctctgcttctgttatcagatctttgggaagtgtcgtggaattgccgactccttttgcctctgcacggacactttccacttccgaatcatccagcccgttggcaaattcccatagctttcttccatggcttttcaaatgcagttccaaaattgccggatccgtattcgccagatctccgatcgtatagatttcaagcttcttcatcgtctctacactggaacggcctgccatgaataattctccgatcggcagcggccacattttcgccgggacttcttctgggaataaggtatgcactttatttggtttttcaaagtcagatgccatctttgccaggacttttctggaagatatccccacattcaccgtgaatccgaaccttttatacacctcatctttgatttcagacgcaccttccaccggagatgtgaaccggtccgcaatctctgtaaaatccatataacattcatccacactgacctgttctatatgtgtcgtgtaagtacgtaaaaattccatcagctttctgctatattcacggtacatctgatgatccggcagataggtcttaagattcggacacttacgaaaggcattcgcaacaggttcccccgtacgaatgccatatttttttgccgaaatggatttggccagtacgataccgtggcgggacttctggtctccgccaatgatcgcaggtatcgtccggatatccaccccggctccgtttttcaattgttctactgctgtccagctaagataagctgaattgacatctatgtgaaatattattcgcacacgctctgactccttgccacaagcttaccgtcttctacgtctatgatgatcgtatcctgtgctccaacgtcaccttgcagcatcagttttgctgccagtgtatcgacatgtttctggaggaatctcttcagtggtcttgcaccatagttcggatcgtatcctccgtctacgacatatttcttcgcatcttcggtcaggaagattgaaatctcacgatcagccagacgtttgttgacatcagctactaataagtcaataatgtcataaatattgtctttcgtcaatggtttgaacatgatcgtctcatccagacggttcaggaactctggtctgaagtgtgctcttaagtcttccattaccgcattctggctctcctggctgatgttgccattttcgtccataccatccagcagatactgagatccaatattggatgtcatgatcaggatcgtattcttaaagtccacggtacgtccctgtgaatcggtgatacgtccgtcatctaatacctgtaacaagatattgaatacatccggatgtgccttttctacctcatcaaacagtacaaccgaataaggtcttcttctgactgcctcggtaagctgaccgccttcatcgtatccaacatatcccggaggcgctccgatcagacgtgacacagaatatttctccatgtactcactcatatcgatacgtaccatgttgttctcatcgtcgaacagattctctgccagtgctttggcaagctctgtcttacctacaccggtaggtccaaggaacaggaacgaaccgattggtttggtcgggtctttgattcctgctttggaacggatgatggcttctgttaccagttctaccgcttcatcctgtccgatgactctcttatgcagttcatcacctaaatgtaaagtcttgcttcgttcgctttcatttaacttggcaaccggaattcctgtccagcgagatacgattcttccgatctcttcgtcattgacactttcgtgtacgagagacagatcttcgtcttttacctttgcttcttcctcttctaactgtttctgaagctgtggcagtttgccatactgaagttctgctgccttctccagatcataggaatgctgtgctctttcgatgtctttattgacctgctcaatctcttcacgtagtttctgtacacgttcgacaccgactttttcattgtcccactgtgctttcttaccggcaaattcatctctaagctctgccagttcctgctgtaagtgttccagacgttctttacttaaccggtcatcttctttcttaagagccgtctcttcaatctccatctgcatgatcttacggttcagctcatccatctctgccggcatagaatccagttctgtcttaaccaatgcacacgcctcatctacaaggtcgatagctttatccggaaggaaacggtcggaaatgtaacggtcagataatgttgcggctgctaccagggcaccatctgtgatcttcacaccatggaatacttcataacgctctttcaatccacgaaggatagaaatggtatcttcaacggtgggttcttctaccataaccggctggaaacgtctctcaagtgcggcatccttttcaatatactgacggtattcatccagtgtcgttgcaccgatacagtggagttcacctcttgccagcataggttttaacatattgccggcatccatggctccgtctgtcttacctgctccgacaatggtgtgtaactcatcgatgaacagaataatccttccgtcactgttcttgacttcttcgagtactgctttcagacgttcctcgaattcaccacgatatttggcacctgctaccagagcacccatatccaaggagaagattgtcttctctttcagtccttccggtacatcaccgcgtacaatacgctgtgcaagaccttctacaactgctgtcttacctacaccaggttcaccaatcaggaccgggttgttcttcgttttacgggaaaggattctgaccacattacggatctcggaatcacgtccgataaccggatccatcttctgttctcttgctctttctaccagatcggtaccatatttgttcaatgtatcataggtatcttccgggttatcgctggtcactctctgattacctctgacggttgataatgcctgtaaaaatccttctctcgaaattcccacttcacggaaaagtgccttcatatctttacttgcatatttcatcattgccaggaaaagatgttctacagatacatattcatctcccatagcttttgcttcgtcttcaccgtgtaccagtgcattgttcagatcctgtccgacatactgctgtccgccctggactttcggacgtttctgaatggcttcttctactctgttaatgatgaggttcttatcaagccccatcttttccatcagtttcgcgatcaggctatcatcctgtgtcagtaacgcatagagcagatgctcctgtgcaatctcttggttgccatagtccattgcaatacgttcacagttctgaacagcctgcagtgatttctgtgtaaatttatttatattcatatagacaacctccttttcactcttgttctatttgcaatataacattacatcgttttattagcactgtcaaccctcgagtgctaattttgttgtatttttttgccacagaaggattgctcccaccgtggcaacggttcttaccttatttaattatccctcaatggaaatataatttttcttttcttccactggttttgcttcctctttcggaacactgaaggagaggattccgttctcgtatttcggatgtacatcctctacggttacgtgttttcctacatagaagcttctgctcatgctgcctgcataacgctcttttctgatgtagttacctttcttgtcttcctcgtctttgttcagtcctttggctgcgctgatggtaagcactccatcattcagctccatctgaatctcatctttcttaaatcccggaagatccatatctacttcataacctttctcggtttcttttacatctgtcttcattaaattctttgcatgttttccatacagttctttgtctacatccggaaatgcaggtaatctgaaatcgttcataaaatcatcaaataaattttctcccaaaatactaggcatcatcataagtcatttctccttccaaatgtttaaaatgtattgttagcatcatcggataattcctggatgttgtttgctggaacttctggagtttcgattcggaatcatatctttgattctttatctttcttcctttgttctatttgtactataacatactttgttagcactgtctagaggcgagtgctaattttttgatttttttttgcaaaccttttcaatgttatactccaaaatgtaacatttacgctcgcaaatactgcatctataaaataataatttttctgttgagaaatttaatgtctaaaaaactatggaatcagaaataatcatgttcaaaaaatgttactccaactagtaaattttacagatgcacaactccgtggtatctggaactgtctacaaactacctacaatgaattactcagcaaatcctatcaaaaaaaaggaaaaaagcctaccattatccgtagaatactccacagataatagtaggcttgactcactcattaacagttacctgcattaccgttacagccatgcttatcttcaccacaatgatgttctccgcaggaatgctcgtgttcatgatgggtgcaatgcacttccggattatagttcaggtttccggctatataattttctgtctacaaaatttccttttctttttgacattatattgccgataacaagcttaagctgctttttgccgtcactcagccatttatcaactctattcttattcgtaaggtcaaataccggtgtccatgtatccggcataatcacactatagtaggcatcaaagttctgcccattatgagccataatcttcttcgccatactgccagcctcacctgtcgttgctccatagctggtaaggaaaaatgtatatccacaattttcaattctgagctttcccagatattctgcaacaatccgtggaagacgccagaaataagtcggtaccaccattccaaatattttttcattggagaaacaatacttatcctcacagatgcagtctacgatagacatacatttttcatctgttttctccgcaatctgttctgcaatatatttcccgtttcctgttgcactgaaatacaaaatcattttctgtgagcctccctttcgacactgccaagcaaaaagcaaaccgcctgtaatgcttcctctttgcttaattgctccttcgccaaaaacatttttccatatccatgtctttcataattgcaatccagcaataatccatcagatcataaatgtcatcaaaataatcataaaatgttgaccttggatatgtcctttaaccgtgcaggatcatggcattaatcgaaaaagcccaaaagactatacattcaaattatgacgaaaaagatcaaaatcatactgtaggggccgccatactatgtgaaagtgggaacatctatgtcggtgttaatgacaggaagccagaaaaaatcaaagcaaaatatctgctgccttttgcttataatacggaaaactagaagcaattatacgatattaatacgttttcccaccaataccgccgcaaccggcatcaccactacacaggcgatcgcaccaaatatcattgatacacaattctggaacaatattttcgaatttaataatgtttccagtgtataatcctgcatcttcagataagaaaataataatagtgattctccaagatacgcaaatagcaatgtattcaccgttgtcccgattacttctcttccgatctgcattccactttctacaagttctgtcagtttcatctccggtttgtgaatactgatctcgtaaacggaagtggtaaccgtaagtgccatatctaacacagcacctaacgtgctgagtatgatcacagctgtcgcaacatttctcatattaatatccagattcatattgtaatataatacatcatcttccgcagcctgtatttcattcagtcctcctgcctcacttctccacaccaccatatagataaagaagaacaagaccgccattgtaatcaatacggctgtaaatgcactcttcgtcttttcattggtaccattttgataaaataatgtgacacatgaaatgatgattcctactccgaccgtaaccagaagtaccggcgctcccgctgccatcagccagatagccaggctaagcagcagcatatttccaaccagtgatatcaatgatatcacacctctgtccccgccaataatcatgatcaaaaataacaggatgaatcccagtatcatcaacatatcttcttcacctttcttatcgttaatttcatcatcacagatgtgatcaggatagatactggtattgccagtacaattccaatactctctatgaaaaatctgcataattcacacggaatatgtaatttgatgatcgtcataaaccggacactgttattcatcctgatcacacacatcggaatcaggccacagccaaacacgaacaacaatacattgatcatcgttcccataatatcatatccaatctctcttccggaccggaataactcccggaatgtaacttctggccgcttcgtaacaatttcactcaatgctgccgcaattgccactgtaacatccatgattgctccaagtccggataacaggatctccgcatgaaaaatctcatctggattatcaatgcttcccaaatattccatcgtagaataatccagttctgcggtatgactgatcactacctcaaatattcccatgatcattgccagtatacatagtgttgacaataaggccgcccatgttttcctgtgaagtccatttaatccgatcaatgtagcaattgcaaagaagagtaccattttattacagattgctacaacatccgcatcatcaccgctttttaaaaatcctactgaaaatatcacaatattgattccaaccgttataatcgtgagcacgcctttctttcctgcgattgtcatcagtgcaaatattaaaagtccaagcaaaacaacaagttctgtatccctttttacgctctgtatgctggatcccacattactttcagacccgttcagcaatactttatcccctttgtgatatttctgttttaacattcctgtataggtatattcgttagaaaaatcaacgattttccccttattcgttccatttaatatcacaccccggattttttgcttatatttgatttcctgtgttccgcgggtgcttttattctctcctgctatgcttgtctctacttttgtaagttttgcaattggtgtctgatacagccatgcatcattcatgacaaatataactgcaatcagatatatcagaccaaatactccatataattttgctcttttgcttttctttacatattccgttatcttcgttgcaacctgtttcattcttatcatcttttcattttttattttacctgcatctctgaattcacaaggtgacagtataatgtatcgtctcccggttccttatacgtttcaaatgttccctttacctctatctctgtctcatctttaggatattcatccggatatacatgtgacacatctccccagataaactccagtccctgtgaacagcaagccagtgcatcttttataatgctataatgatagtatgttccagttttttcgttttgtccagtataatataagccatcgatgcaaagtgtctttctaatatatttatctggttctaccatcagctgataaaaagtagcatagaccatatctttattcatatttgtaaggtcataatcaacatcactacctggtgtctgttgccctccctgttccttcgattcctggctgttctcttcctgccgttttttcgtttctttacgttttgtattctgagtttcttttttttctgtcttttcctttacaattttatccacggaagagcctgtagtaatcttcttgctttcttttttacacatccagctatatttatcatacaaaagagcatacaaacgccaagaataatccatttttttcttctcatatcatcttctccccatcatccgtcctgctacacaactgataaagaatgctgccatatctgcagccacgatagtcgagccaaccggtgttccggcaagtatggataacaaaattcctataaccgcacagataacggacaatatcaccgagcacaaagttacacaaaaaaagtcttaaacacacgcacagacaggacagtcttctcctgtgcatttatgattttcttctttgacaatatagaaaagagaagccaatgtcacgaatataaagatgatgctaaaccatgctgcaagatgttttcttttttccgtagtcatatccttctcctttctcattaacgttcttattttggtttaagtgttttttctacactcattacagattccatagaagacagtacgtttgggatctaattgaaaatcatgatgttctgtcatgtgtctgctcaggcattcaatctcatcacattgaatatgaatcagttttccacatttttcacacttgcaaggatagcagctctcataatcagatgtctcactctctcctatgtactcaaagcaggcactgtttgtaccttctaccacatatttctcaaccaaaccttcttttaccatcttttccagctgccggtatattgttgtcgttccgactgcaatttcacggtctttgaagtattctctgatttcctgtacagtaacatgctgtccctgcacggattgcagaaaagtatgtaactcagtcatctgttttgtcttatatctggcttttgccattttgacctctccttttcaatttggaaatcatttttaaattatcttcattagccccggatacttttctgtccccactgatctatctgcactccataataaccgcttcacatctgccatatccaagctgtgaactgttcagacacaacgtgtaattgctggcctttccccacttctgcccggtataaaagttataatttgtcatgcgccttttatctgtatctgctatcagctttacagcctcctgctcattgacatgatataacctgctgatacgctgtatcttttccggcatatctccatgaataaacacattcagcacatcatccctgtctttcagtataaaatctgcatttcttcctataataacgcaagattccttatccgcaagttccagaatcacctttctctgtgcttcatataccatatcttccaaagattttcccgtgatatcccgtccggcaaatgcataggcaaacagtcctttctttggcgataattcggcactttcctgaatataatccggtgacagtcctgattcttccgctatctgattgatgatatttttatcgtaataagcaattcccagcttctttgccacttcctcgccgatgaaacgtccgccgcttccaaattctctgctgatcgtaatgattcgttttaccattcctgtttcctccttacttcaaaaccttgttttttctgattctctttaagaatacatatcccaccagacatgcaatcacttccgtgatcgggaatgcccaccagattaatgcaactcccatctgaccatttctggcaaatatagaaaaaattccagccagtggtaagataattacaagctgtctcagaagtgagataaccagtgattccataccactgttcactgcctgatagattccctgataagcaacattaattcctgcaaacaagaaacttaaagaaatgactctcattgcactgataaaatatgctctcgactgtccggcattaaacagcgtcgcaaatgcccctgggaaaatctctgtgattgcaatacccagaatcatcaatgcaaccgtatagatcagaccatatttgattccatcctggattctcttcttgcttctcattccataagcaaatgcaatgatcggtgtgattgcatctctgagtccaaatgcgaggaacagcacaaactgttgaaccttatagaataatccataagctgtctgtgcagatggattgaatttcagaatcagattcattacatataccataatagacatcaatgcctgtgcaatgatggccggaaggccaatcgcatagatttcttttataatgcctacatccggcttcatgtatttcacatcatgctcaaattctttattcagctttatctggaaaacaagcagtaaaactgcagatgctatctgaccaattactgtcgcataagctgcaccttttactcccatttctggaaccgggccgataccatagatcataattggatcaagaatgatatttacaacagctccgactacctgtccgattgtggaataaagagatcgtcctgtcgcctggagtaatttttcaaatagtgaaaagaaaatgattccaaaagaaatcacacagcatatcctcagataactgactcccatttcaagtacttctgcatctgtggtctgagatgaaatataagctttcactccaaaaattccaaataacagacataccacataaataatcacaccaaggaacagactgtttcctgctacctttgctgctttcttactgtttccctgtcccagtgttcttgcaagaagtgcattagttcctacaccggttccgattcccactgcaaccatcaacatctgcaccggaaatactaaagtcagtgcatttagtgccgcttcactgcccgttttcatatttcccacaaacgcactgtctacaatgttataaaccgcctgtaatgccatagataaaatcatggggattcccatctggatcatcagcttatttaccggcatgtctttcatcttgttactttctgccattttgttttcattcctcccttttctgcacaaaaaaatgcagctctgtcgtataagttggacttacgctgacaggctacacactttttcatgacaaatattatgttttaacaaataaaaaaagagcagcaggtaaactggatttacgcttactcgctactcgtttgtgactattatatttcctgtttttccaaaagtcaaataaattttttctggtattttccacgaaaaattattgtaaaacctttgaactcacatccgtctcaaacatcggaagataacgaagttgatacgatttattttccatgtattacgctccttacattcttaaatacactttcatgagaaagtctttcctcagttgctgccgcctgcctgtctgcttcatcaagtttcatttctacattgtcagtaagacttgcatactcttctaaacttaaaactaccatagaaccataaccattcttcgttaaatacacaggattcccactatttacaattgtctcaatttcaggaaatttgtttcttaaatcagaaactggtcgaatttgaatcatttcttcctttcatttttattatctatattttatcataatcacaataatatttttattttttacttattttcttctcctgctttccaagataaatataaaatccaacattcagcacaattcccaccatcgtcgataccggcgccgcaagaccaatcttcgtaaggctcgcatccggttggatactcatgacatatgcaaatggaagacgtaccagcaaggtctggatcaatccctgtgtcattacccagaccgtcttattattaccattgaagtatccgaccatactgaacaggatcgctgtcacgattgtctccagtgcaaatcctttcagatatgcatagcctttctggataacggctgcatctgtcgtaaagaatcctgcgagcatatcgccttttaacatcaccagtaagaataccatgcatcccacaaccaggccgacaccgattccggtgaacatggatttcttcgcacgtttcgtctttcctgctccgatgttctgggatacgaaagatgccatcgactgcatcagcgcacttggtaccagcatcgcaaagttgacgatcttgcatgcaacaccgtaacctgaagaagcttccagaccaagccggtttacgaatgcacaaagtgccaggaaggacatctgtgtcaaaaactcctgcagtgcaagcggcagcccaatcttcagaaatttcttacactggctgttcaggctgaaatcttttctggtaatcttaaatggaagtttctttttgatcagaaggattacggcaaatactacgctgagtgcctgtgctgtaaccgttgcgatcgccgcacctgctgcatccatgtgaagtcctgccaccagtaccagatctccgatcacgttcacgatacatgcaacaaatacaaatagtaacggagatttactatctcccaatccacggaaaattgcggataaaaggttgtatgcgacgataaagaagataccgcctccgcagatacgcacatatactgatgtcagatcaactgcttcttttggagcctgcatcagtactgagatcggatgtgcaaatcctaccataacgataaataagcaggctgcaatcatagtaaatacaactgccgagccgccaataaccgaacctatctgatccggtctcttttcgcccagataccttgcgatcaaaaccgtgattcccatcgcaaactgaatcactacgaaagtgacaagattcaatacctggcttcctgtggacactgccgaaagtcctgatgtcgaaccaaatcttccgaccaccagaagatccactgctccatatgccgcctgaagaatcagtgctcccagcaccggcatcataaatgcaatcagtttcttaagaatgcttccctgtgtaaaatctgccttatcgttcatcgtagtgtttcctcctttcacacatgatctgatagaatttttcgatcgtctgtatcatgcattctgcatcttcgtccggtatttcttccatatatggaagcaggctgtcaaaatattgttcgtcatatttctgtgacaattctgagccttttttcgtaacagtaatgtatgtgacacgtccatcctcttcggaagcaatcttctgaagatatcctttttcttccatttctttgaccgttcttgtaacacccggtcttggaagctccattgcatcgctgagatccgatacttttacctgtatgccttttctttccaatgactgaatcacatccagatactgaataaaggatgctctgacaccttccggcagcggcgggagcatatcccgggtccgttttgcctgatagcatgcgtcgaacatcctttttatgatttcacttgtcatattttgtcctccttatataatcatcatacaattactgcttaccattctcttgatattgcaatgcattcataaaattctgttaataaacagtaatttaaataattacctttgataattatatgcagatttcaaaatttgtcaagaacttatttcattgttacacatttgcatggcgattaaaggcggggaaaataacttttccccgcctctatgcatttatatcagtattatcctacatggcgttcaaatctctggaatccaagaatcttctcaatccgttccatcgcatcatccggaatctccagatcaacagctttgaggttattctcaagctgcgacggcttgcttgcccctgcgatcacgcagctgatctccgggtgtttcaaaatccatgccagtgacaggattgctacatttgttcccagatcatctgccactttggaaagttcatccacaattgcaagattttcatccgtcagcagattattgatctgtttgtctgcctgatgtgttgcacgggatccttccggatatggctgtccttttttatatttaccggtcagaagttccatgatcttaatgtcttccggaatttttttcccaagtttttcgcagacactgacggctccgatcgccatcagatcatttccacatacaatacagtcaatctccggatttctctgtaacagcgtcattgcgccgatctgaccggtttctacagaaaatgttcctgcataatgcattctcttattgaacgatattccattctcttccagaccttccacaaagccttcataacgttctttgcttggcgatatcgagatatctgctgtaatatacgccggctgtctgcagccttttccggcaatatatgccgctacatccttcattccggaaatgcattgtcaattatattccgtatttttccagatctacccttccgtttatcacttcgactccatccgcccgaagaagttctgcctgcacattctggcctccaaatgcaaatgctccggccagttctccttttgcattaactacacggaagcatggaatatgttccggatccggattcttatgcaatgcattgcccacggctcttgccatcctgggttctcctgccatctctgcaatcttcccataagttgccacatgtccttttggaatacgcttcactgcttcatagattctctttgtcggactgtccgtaaccagatcatagctttctgcgatcattcttttgatctcttcttccggaatggtcccatccagaatgatcgtattccagtgttctttattcagatgatatccggccgtcactgactcatacgccgagcgccagaagtctctccactccggattcactttgacattcagattgatatattcttcccgttcatatatccacagaaatgtttttttacttcctttaatccgcaccagctgccagttcggatcacgaaatggcttttcttcatatacattataaaatgacattccgtatgctaatgcttcctctcttgtcatcatatacttcttatccctcctgatttctgctttcagattaacagaaatcagcatttctgtaaacggtaatgctctggcatttatgcatatgaattaatgtaatagaatgccttaccccgccaatatcagtactttttcagaagttcctcacatattccaatatatttttctgtataaatactgcccttttcccagataaaatcaaaatcatgctgcattttaaaatctgaaagcctgatttctttcaatgttccgttcttaagttcatccgctaccgcaattttgtacataaatgaaattccacaatctctttttaaaagcccgataattgtatgcatattttccacttctgtatagtgaagaaaatcttttatccccattccccttgcaagaagtaactcttctaaaatattccttgtcccggatcccggttcacgtacaagcaggcgctccttcaccagttcctgcatcgtttccggcgattttacttcaaatatgtgatctctggcacaaactgctatatattcttcggtactgtaatttttatgttcataattttccttcggataattaccctctacaagtgccagattaataattccttcatccaacaatgttaatagctgtgttgtatttccataatgtatgtgtagattcatctccggatgaccgatcataaaatctgctattttatctacaattgcatattctccgatcgtcattgtaacccctatagaaagagattccatcttatgggattcatttcttatctcattcataattgccagctgatcatttttcattgtcatcagacgttttctgagtatctcccctgcaggcgtcagatacagttgtttattacaataagaaaacaatctggtattatattccttttcaaggaaacgaatatgttgcgaaactgccggctgtgtaatatgtaatcttcttgctgcctctgtaaagttcatcgtctcacataccgtaagaaatgtatctgttctaaaatccagcataattttcttcccttcattgtcaatttgattttcacaaatgatttttattaattttctgtcatatctgtcaataattttttattatcgttcaataatattatataattttttattatcgtttaccagtgttataatctctaattggaaacctgtatgaactaacaaaaaatgagaaagaggaaaaaacatgaattttttgaaaaaaaacctaaacggtatactggtttgttttgtgattgccgtaccttcctggcttcttggaaagacattcccagttgttggcggccctgtcatcgcaatccttgccggaatgctgatcactttagtgtggacgaacaaaggaaaagccgaatcaggaatcaaatggacttctaagattattctgcagacagcagttgtcctgcttggattcggaatgaaccttggcgtcatcttacagaccggaaaacagtcactcccgatcatcgtatgtaccatcagtacttccctgatcatcgcatggctgctccgtaaaattatcaaagtaccttctaacacttccatcctggttggtgtcggttcttccatctgcggaggatctgcgatcgctgccaccgcaccggtcattgatgcagatgataccgaagttgcacaggcaatttccgttatcttcttcttcaacgtcattgcagccgtacttttcccggtacttggaagcgcacttggttttgacacaacaggcggtggatctttcggattattcgcaggaactgcgatcaatgatacctcttccgtaacggctgccgcctctacctgggacagtatgtggaaccttggaagcgagacactgaatactgctgttacggtaaagcttacacgtacactggcaattattccgatcacactggtattatccctgatccgtgcaagatctgcctcaaaagccggaactgctgattcttccgcaaacaaattcagcctgaagagagcatttcctatgttcatcttatacttcatcattgcagctatcatcacaacagtatgtatgagtatgggtgtcagcgctgacgtatttgctccgttaaaagaattatcgaagttctttatcattatggctatggccgcaatcgggcttaacagtaatgttgtgaagcttattaaatccggaggaaaaccacttctgctgggtgcctgctgttgggttggaattacaattgtgagccttggaatgcagcatgtaatggggatctggtaatttttttctacttaattcactaagctggctacccggactggaataaaagccggaaaatcaaggcttctgccataactttccggctacacataaaggttaccatccttttattgtcatttttcagaccagcgatataatccccggcttctctttacctgttctgtgcaatcgcggcatctaccacatgttccagcaaaattgaagtcgtcactccgccgacgcctcttgggaccggtgtgattgcctccacaatcttctctgcttcttcaaaattcacatctccgcagagctttccttcttcattcacattgattcctacatcaatcacgatctgtccttctcgcagatagcttccatcgatcactcctgcttttccggccgctacaactacgatatctgcttcctttactacagatggcatgtccaccgtcctggtatggcagatggttacggtcgcattcttcttgatcagcatcatcgctgcaggttttccgactacaagacttcttccgataactaccactttcttaccggtacagtcaattccataatgatccagtaccttcatgcaggcactcggcgtacacggtgcatatcccatatcttttcccatgaacacacctgccatggaaagatcggtaattccgtctacatccttttctacggccagtgcattcacaatcttttcttcattcagatgcttcggaagcggtctgaataacagaactccgtggattttttcacttttatttacctggtcgatcgtctttaatacctcttcttcttctgcatctgcaggaagaaggaatttctcatatgctactcccagtgtctcacagcgttttgttgcgcctctttcgtatgcgatgtcatcttctctttcaccgatacggataattcctagtgtcggtgtgatattctgtgcttttaaagtttctacttttgctttgatttcttcattgatagaagcatttacttcttttcctaatagtaattttgccatttttcctgctgctttccttttattttgtattttctccggacatttccggtttatccgtctttatctcactggattttaccggatacggctgtttacttccgcaaatatccggtctgcttttgcttcgtattcttcccgcagggaatctgccagatgattaagctcttctgcttttcttctgtctttcattgattttgtattaatatatacattcagtgaagccccctgcattgcggattttaaaagtgttgctccgactcccgcatcacttaatgcaatccggcttccttttgcagcgaatacttctaccagatcaatgcctctggcacaggtcttcataatctcaatcggaacactacatgccgtattcagcgcctcttccataatctcttcctttttggcaagctcttccggcgtagacttcggaagtccatatgccttactgagcggctcgaatgcttccgcatccttatccatcagttctaaaaattcttttgcaatctcatctgcctgttttttgcattcgatgatctcttcttctacatctgcataggtcttctttcctacagtcagacttccgaccatattaccaagtgcgatcccgatggctccggctaacgccgatgccccgccgccgcccggaacagctgctttacttgcaagaacttctatgaaatcttcacaggtctgggatttaaagtttctatttggattttccatgttgtacctcatttctaaaaatcatgggtacattatacactgtgaactcttttactgcaatacactaaatttgggagggaaaattaaaaaattctccctcccaactcaaaagcttctttccaaacacataccctgccgccgacagcttctttcaaatacatgacaatttaaagtatttcatctttcttatccaggattgctccgcctgcactgcacgccgggcagatacaatatttaccgccgttcgctttagatgcctttccgaaatccctaaagcaaaagatttttcatatcactccactttaaggatttcattcatttttatattcccaggacaatcttgatcagcaataacgccaacaccagcaggatgatcggcttaatgatctttacgccgttcttcacaaccatatgtgcgccaagataatgtccggcaatgctgaataccgacgccgaaagtcccagcacccaaagaatctttcctgcaagaataaatgtgatcaatgccgatatattcgatgtcagattgacgaccttcacattaccggttgccttctccatatcaagctttcctaatttggtaaatgcaagcagtaaaaatgttccggttcccggtccgtagaatccatcatagatgccgatcacaaaagaacatgctgccatgatcagatactgtttttttctggtaaatccttccggtatcaccggtttcagatccttgtcccgcaatacacagaatgcaacaacaggaagcacaaataccagtaccgtcttaagtactttgtcactgatgatcagcgccaggttcgcccccgcaattgaacccacaaatgcacaggctaccgtacccgggactaaaaatatgtcaacacatttgctcttcaccaagtgccatgtcgacactgctgttccagtcgctgatgataatttatttgtcgcaatcgcatggtgtaccggaatccctgcgaacatatatgccggtaatgagatcaatccgccacctccggcaatcgcatcgacaaatccggcaagaaataccagtggacacacaataaggaattcatgtaaattcatatgtttctctccttcatactctcaaatccataaattaatctatcgcatccatatattcatgtcaagttttcaggagataattcttattctgctctgctttcggatacacggcgatttacattcttcaccagatccagtacggtattgagcacatagtcttcaccaagcgaagtatcgatacacatctgataattacctgaaaagcagatctacattataaattctacttcaatatccttatttccaggaatcctgtactgttcttccacgtcagagccccagctgtcgattccgcctacaccacggaccgctccatagatacaaagtaccgttcttctttccggcggcagctcttcctgatgcgttgcattctcaagttcttctgcagtataaggaagacatgaaaatgcaaacgtggaatgattgatctcactgcccgcccggaatgtaagtccactttgttctatatgacgattccggttatccaaaaccgtacttctcttcactgtcacccactcggtatccatatgcatgccacattcctgcggaaccagatacggtgtaaccggaagaccctctacttcataaattccgtgaatacccccggcttttctatccggatatgtctcacccgataatccttcataaacgaatccgtctgcctttgtcggcatgacaaagcgcataccgaatgcagggagctccggcattccctctttcccgtaatagtgcgctcttactctgacatttccatcagcaaataccagatacgatacctttacctgtgttgacggaacagttaatgtctcatatgtaaatataacttccacacgttccgcagtttctttatccgaatatttattatttaccggtgcgctcggtttttctatcttggttccgtctatccgtacctggatatccacacatttctggaacatatcggcagtcatccacataccggctctaaacgggaatccatttccacgatcattgtctgtggttgctctccagaatgtcggcttcggtgtgcgatacagccattcctttccatgctttaccatggattccagaccgcctgtctgataagaaaagatcagatgaaagtcttctccgtgtactccaagtgttacatctccatacacaattcctaattttcctctatctgcgtaatccatagtaatgtctcacctcctgcattgccggcttttccgttctgtccgcaaataaaattccatttcccgaaaattcataatccgatggcctgtcatcaaagtcaccaccataacgcaatacatcacgtcctgtcacttcatccttcacgaacagtgcctgatcgatataatcccagatgaagcctccctgataatcctcatactgatccagtaatctgatataagattccattcctcccagagaatttcccatatcatgcatatattcacataagataaatggtttcttcggattattttccagatattcttttatcttctccggcggagcatacatctggctctccatatcagaaattaaatcctcataaggccggttctctgccacgccctcgtaatgcacaagtctgtccggatctttttctttatagtaacggttcatctccaccaggatatcaccggcatacgattcatttccaagtgaccagaagagtaccgacacatgattcttaaatgattcaaagttcgatactgccctgtctaatgtacatcctctccagcatccgatacttcccggaacattccacgacggttcaatcacaccttgtttcagccacgatccatgtgtctccagatttgtctctgccatcagatagatccccgcctgatcacatctgtaataccatgaaatatgatccggataatggcaggttctgactgcattgatatgattgcgtctgatacattcgatatcccatttctcatcagtttcggtaatacatcttccgcttctggcattccattcatgccggtttacaccattgatgatcagacgttttccattcagcagcatctttctgccttttaattctatcttacggaatccaatctgatatggaaccacttctactgtctcgcctttttcattctgaacttctatcagaagctcatacagatacggatcttcattgctccatgcatgtacggattcttctaattcataacggaactggatctcattgttcactgatccttctaccggaagattcttctggatcaccgggttgttcagattctccgtttcatccagtaatacatgattttcatcactatagatatctcgcaaagaaacttttattttaccctggatattattttctttctttttctgtgataatcggatatccaactccagttctgcctttccatcttccggatgatacttcggacggatccacagatcttcaacatggaccgccggtattccgtacaggttcacatctctgaaaataccaaaaaaccggaagaaatcctggtcttccagaaatgccgccgtactacgcttatgtacttccactgccagcagattatctttatcttttacatatggtgtaatatcaaattccgaaaccgtaaagctgtcttctgcataccccacgaactctccgttcacccatacatagaatgcctgttccacaccttcaaaacttaagatgatcctctttcctctcagtccgtcattcagatcaaacttccggatataagaacctaccggattatattcggcctggctgaacatacctttccctttttcttttccatatcctgccggtcttctgtaaatatgtccttcccacggatacatcgtattgatataatgaatcttatcgtatcccgccagttctatatgctgtggcactttcatttcatcaaaatttttacagttaaaccatttctgataaaaatcagccggacgttccaatgcattcactgaatagtggaacttccagattccatttaacgattgttttaacctctgattctgcttcttataatcttctttattctcataaaacttatgatcactgtgtgcatccagacgattcacacgaaatacctgcggatcatctaaccatctgatgtctgctttcatttgccttttgcacctccatttatttttctttctcatctatcagtaaactttttccaatgcaggggatttaatacccgagtgcttcatttctgttcatccagaaatgaatccccgtcgtggaatccatccatctgtcctcgttaaaatctttgacctccacccactgtccttttctgtatacaaaattctcatcgaccagcgaccaggcttcttcgaattcttccgtttcatcaaaattttttatcgaaagtacctttgccttgctgcaccggcaagaaggacgtgttgccgaagtccgtttagcatctgccgggatcagaagctgtaccactctgtcattcacacatttcttatagccaaggatcggtccggtctccggacagtgcatgcggaaccactgcgttgcttcgtctgactgaatgtcatccagcttcgcgtgctccaatacagccccataaaggttggctcctttgatgttgcattcccgcatatcacatccacggaatgctgccgtcttcatatttgcattctgaaaatttgcaccatgcagggaattgccgtcgaataatgcattttccacactgcagttttcaaaattcacacgttccagatttacattttgaaaggaactcaatgtgaagtccatattatgcagatccattccgtttagatccatgtctttgaattcacattcacgaaataccggatgctctcccgcatctcgcgatttcatagctttcagaagtgtctctttcgttatctctttcatagcattacaccccttcactcccgtattatctatacaatttgctttttttactgatagttttattataccgcaattcttaacaaaagaaatccccaaaataccatatcatccggtattttgaggattttattttcatattaacaaatgcaatataatgatttttcagctgtccgcagattcctagttcaggaaatcttcatcatcaaaatagttgattctcatagcagcctttacatctttcaatgtctctgctgctttcgcctcagctaccctgcttccttctttcagaatttcgaatacttccggaagcttctgctcccattcttttcttcttgcacggattggtgccagctctgcctgaagaaccttgttcaggaatttcttcactttgacatcacccagacctccacgctgatagtgtgctttcagttcatccagattcttatattccggccagaattcttcgaaatattcatccttgcagaatgcatccagataaatgaataccggattgccttctacctgtccaggatcttccacgcgcaggtggttcggatctgtgaacatggacattactttcttcttaacaacatcttcttcatcagaaagatagatacagtttccaagtgatttgctcatcttggcctttccatcgatacccggaagtcttaagcatgacttgttagatgggagtacgatctcaggctcagtcagagtctctccatatacactgttaaacttgtgaacaatctctttacactgctcgatcataggcatctgatcttctccaaccggaactgttgtcgcacggaatgccgtgatatctgcagcctgactaatcggatagcagaagaaaccaaccgggatacttgcctcaaagtttctctgctggatctcagcttttaccgtaggatttctctgtactctggatacggttaccagattcatataatagaatgttaactctgtcagttccggaaccatggactgaataaaaatgtgacatttctcaggatcgattccgcatgccagataatccaatgctacgttcataatattctgacgtaccttctccggatgttcggcattatcagtcaatgcctgcgcatctgcgatcataatataaatctcatcatattctcctgaattctgtaattttacacgttctttcaaagaacctacataatgaccaacgtgaagacgtcctgtcggtcggtcaccagttaaaataatcttgcccatcttacttatctccttagcatatatttcaataacctgtatgggtatacaaattcattgtctctaattattttattataattctttctaaagtgagcgtcaatacagaaaaaatgcatcattttacctttcctgaatttttctctaaatccttttggataaaatgatgcataacaatttataaattatgctgcccctctgcttccgttcttacacgcagcttcgaattctttcaattttctttttgcctcgttgcttagattctttggtacatctatctgaacagtcacatactgatctccatatcttcctgcatccttcatagacacgattcctttaccttttaaccgaatctttgttccggactgtgttcccggattaatcttgcacactacccttccggtaagcgtctgtacaactgcttcaccacctaatactgctgtagtaaacggaatcatgacagttgaatatacatccatatcttttcgctcaaatcccggtcgtttaccaactctcactttcagcaacagatctcctgccttgcctcctgaaagtccaggcattcctttgccacgcagacggatactttttccgtcactgatgccggccgggatatgcactttcagtgattttcctgctgcattactgccctgtgcgtctgacagccggatgactttatctcctccaaatgcagcctcgtcaaatgtcacatctatctcagcggtcacatcggaaccatcctgacggaaatttccttctccgtcgaatccatgatttccaaatccatttccgaatccgctgctttcataacttcttccggacgtacgtgtccttcctgatccactatttccaaatccgccaaatccatggaacccgcttccgctgccttccgagaatccgccgccaaatatattcttcaggatatcgtccatatcgccgccttcgaaatgatattcatggaagcttccattcggtccggtataactgtaagtaccgccgccagatccgtttccatagccatatgctccactgccgcctgcactgccatcaaaagctgcatggccaaactgatcatataatttctttttctccggattactcagcacattataggcttctgtcgcttccttgaacttttcttctgcctgtgcatttccggcattggtatccgggtggtatttcttggccagtttacgatatgctctttttattgtactcttgtccgcactcctgctgattccaagaacatcataataatctctttttgccgccatagttctccctcccgtcatttattctatattattttctattatcttcatctatgtgaacaggatttcgtggaatatgtgagtttcttacgttatcctgattattttctctttatgatattgtaccccacaggcttaacacctgtggggtacgtttactcttttgccatacaggctataccgtcacttatcgtttcccgcatctgcctgtcattaaccttcgattgaaatgtaatgtttcttctcttctaccggttttgcttctgctttcggaacactgaaggaaaggattccactttcatatttcggatgtacatcctctacggttacatgttttcctacatagaagcttctgctcatgctgcctgcataacgctcttttctaatgtaattacctttcttgtcttcctcatctttgtccagtcctttggctgcactgacggtaagtacgccgtctttcagttccatctggatctcatctttcttaaatcccggcaagtcaatgtctatctcatatgcattctctgtctcttttacatctgtcttcattaagttctttgcgtgttttccatacagttctttgtcaacattcgggaatgttgggaacgaaaaatcgttcataaagtcatcaaataagttttctccaaaaatactaggcatcatcataagtcatatctccttccaaatgataaaaatttataattagcacgatcggagaattccgaggtgttgtttgctggaacttcgggattccggatgtttgaatcttgtatgaatgctgtcggcttcatatctttgattctttatctctcttcctttgttctatctgtactatagcacgcattattagcactgtcaagaggcgagtgctaatttttttaaaaaatttgtgtacctgtaaaatgaaaaatctacttccatatttcatccacaacatattcccggctcctggtatgcagcactttttctcttgccattccagtaaaaatataatctagcgcggcagtacccatcattgatagtttcttatgatcgcatagttacgaaaaaggcaagtatcttttttcgtgatacttgcctttctgaaatattaattttatcaaccagatattctccagctgctttactgtctattcataattttctctatttcttctcatccaacaacatcacaccctgcgccggattcttatcaatcgcaccaacaatcggatgtggtacataacactcttccagatatgcaatgccttctgctgtcagtcgaacgttcaatgcacctgccgcatcattcagatactgcatcttcgttgcaccgatgatcggcgaagtaacaccttttgcccactgccatgcgattgcgatctgcgacatcttacactgatacttttctgcaagttcgtgtacgcgggtgacaatcttcatatctgcgtcttccatacggtcatatttgccaaccgcaactctgtccgttcttcctcttaaagattcggatttccatgtcggtcttgcaaggtgtcctgctgcaaacgggctatatggcatcagtgagacattcatctgtttacagataggaatcaattctctttcatcttcacggtacagtagattataatgattctccattacagacttgcaaatgcatagaaaaaagcggatcatctaccgacaatccactttctctctttctttacatttctttacatacatcaatccatccacatgccccggcaacgtcttccagttctgcaatcgtaagtctgactgcactgtggtcattaccagctgcaggatataccgtctcaaaccgtttcagagactcatctagataaactttaattccatctttaattccaaatggacacacaccgcccggggcatgtccgatatattcttctacttcatcgaatggaatcatcttcgccttcacatgaaactgatccttatatttacggttatcaaccttcgccgttccctctgtcaggatcaggattggttctccatcaaccagaaatgacatcgtctttgcgatcattccctgctctacaccgagagcttctgctgcaagctgtaccgtcgcacttgattcttccagttcaatcacgtgatctgcataacctttttcttccagatatttctttgctctttctaatgacatgatccatatcttccttcctgcatctatactttctttttattatactacttctatactgcttcttcattcctttttatatcggttaattcactccacaactcatgtttcagcaggatagcagccatcaatgctgtcaggaaatcagaaacagcctgtgcggccaacacaccatgatatccgatcatatgcgaagcaataacgatcacaattccatagatcacaccctgacggctgactgataacaagaatgctcccattgcttttcccgccgactggaatacacaggtcgtaaccagaacgactgccataaacatcattcctgcttgctgtagacgtaacatcagcacacccgaatctacaatctcctgtgtcttcatgaatacacggatcaagggtcttgcaccggcggataagattactgccagtataactgccagaccacattcgaatttataacagaatgcgagaatctctttcagacgtttcttattccttgccccataattataaccaaccaacggttgacatccgaacgcaaatccaaccagaatcaacgccgcgatcatatttactttcatcacgattcccatcgccgcaactttattgtttccatatacaagcagactcctgtttgtaacagtaactgcaaagctctgcataaagttcgtgatcgatgcaggaattccgattgccaggatctgtctgaattcttgcatgttaatatgcatatgtcccggatcaatcgacagctttttactctttttcaaatatatccacacataataagcgtccgtcgcaatatacccgatgattgttgcaatcgcggctccgccggctcccatacccagtaccgaaataaaaataggatctaatataatattcactactgcaccaaggacggaaccttccatggatgctttcgaaaatccttctgacctgagctggttgttcggtgtaaatgatacaataataaatacagaacccagcaccagatatgtatagtactgtgatgcatatttgtaagtatttgcatccgctcctaataaatgcagcatcggtgcacggaagatcagaagtaataccgttacgatcactccgcagataattgctccataaaaacagtaggaactgatgcgttttgcatcctcatctttcctctgtccgaataatcttgcgatcacagaacttccacctagtccgaagatatctccaagtgcgatcatagccgtgaacatcggtgctccaagtgacacacctgctaccagattcgtatttcccgttcttgcaatgaagaatgtatctaccatattatagaccagtgaaatgaccatactgaataccagcggtaatgccatattaaaatatgccttatgtaccggcgctttttcaaaaagttcgttttccatatatctgtaaacctccactatgattttatctgaaatattccatttcttaattattgttttttgaactgtatcggttattttacaacaaactttctgttttgtcacaggaatatttccatattttattgtatattttttcatatatatctgtatatttccagctgaccgcagaacccgatatccacattttcatttcttatccagcttattatctgcagaatttcttaccggcatcttcttttgcagcttctttcaagcgaccaacggcaaaaaaagccttggatccggcacaataatccaccggattcaaagcttcttataatcttttattttttctgattaattttcttctgcgatacgatcagtcccagcagaattaacagagctcccgtcacagatacgaacgtcatcttctcatgcagtatcaccacagatagcacaaccgtcacatcccatgacaccccttgccacatcagaaccggaatcaggaataacattccgtaaaaatagattctcctggtcaccgctgccgtcggataatcccattcaccgattttcttgatgattgcggaatagaagccccaggaaatcatagccgtaaatgccaacatatctcccttcataaaaaagggtagcaaaaaagcgggtgatgggaatcgaacccacgtatccagcttggaaggctggtgttctaccattgaactacacccgcatcaacaatgctcatttataatagcatgatattttctaaaatgcaagcactttttaaatttttttaatttttttgacacttaactcaatttcatatctacaagacctgccactactaattctcctatttgcaatattttttcaaagtgctacaatatgtaaccgaaaaaatattacatcaaagaaggtatatgatatgttccaatattatctgattcattattttaactttaagaatgccggaggcttcatgcttgtctccctgctctgcctgatcgcagtgcttgcgatcgttattctggcagcaaagcttaagaaacactataaacttaatacacaggatctgacgccaaaacagatccggaagctgaaccatatccacaaagtaaaagaaatctcgcttattgaaagcttttatgagatggtattttccagtacttcggtactgttgttcctgtctctttattatattatcgatgagcggatcccacaggctgccttttactggcagaaataccagaacattatcttacttttatttctggtattttctgtatttatgacaaactggttcgatatcctgttcgttccgttaactgcaattccgaccagacaaaaggcgtccgtgcggctgatctctgccttttatattattctgatcttattatatatcaagttcatctaccatgattcgaactatgattcactgatcatgtattttatcacactggcagtcggccgtttcctgtactttgattctacacttgaagatatcaaagaaacactgcaaggtgtcgcaagaaatctgccgcttctggtactgatgggaagttattccgccatcgtatgctggtatggattccactgtggattcctgttgacttccaacggtgtgatccttagtacgctactggcgcatctttttatggatgtatcgatttttgtgctggataaaacgcagttggtgaaattatttatttaacctactttttcaatataagcaggttacaaattataacgcacattatttccataattacaatacttcctgcaatcgctcctaccggataatgaaaggtaaaataagaaagctgttttctcatataaacgttgattccttttagtatgattgatccaactgacgctacaaggcctgcgataagcagtacataatagctgccttccagcaataacagctttctttcctgccggcgtgtcattccaatctttctcataatctccagttcttttttcctgcccacaattcctgtaaacatagtattaaaataattaaccagtccgacacacaataatattacactgatacttccgaacataattctgtttccccggatgtagtctgcatttttctgcataagatctgatcttgcaatgtaaaaaatgcctgcttctccttcgccgtccaggcttgtctgtgtattgcttttccgccgctgattttctgccgaaagaatcttctggatttcatacatgatctttttttctttctttttctctacgtttaattccatgcaaaatgtctttctcttcgtaggtaaacggttaaatcctttttcactgaccagataatagatatctccttctgcaccatgccaggtctggtggatctccgggaagtcatctgcctgattatccagatagccgcttaacgtatattctgtagacggcgtttctgcttttattatctcatcttccttgtctctttctttgtccgtcatggaattccaccggatacacgtttctttattctttaaaggagataaacataccatttctcccactgctttttctgcctgtcttccctgcttttgtgacaacttatgatcatggatgatcattacccctgttccgttttccagactgtccatatcaacttttaacttgtttttctctacataagtttttaatgcttttaattcattttcactgacaatctgaacagtatcggcatccagtccttcgatcatctttgccccagattcataatcagtactgctttcttctgcatattccacattttttcccagataagtatccttttccagtggacgtactccatctctggatatactggaaagcatataggctccttcggttatataagatttctttttcttcacaccgtcaagattccacaagcggttccgcaccttttcggatatcggtgaaaattcatcatattcattgtcatataagagttcgaaactatctccttctgatttcagtggatcttgatccggcgactgtgtctgatattctgtcccgcttccctctttttgtgcaaactcactgaattcccctgcgatcaggaaatccggtctctgattaatgatattcgcataatcacttccagttgtgatcaccataacgatcaggaacatttctattccaaggaacattgaaatgactgtgatgacaaatctctgccggtatcttgtgacgtttttccacgccataaagcacagttcctgtgtttcgcttctttttttcttattaaaagtgccttttcccaggtctgtccttctacgatgccttttctttcttccggtctgctccgtgtaatgcattccctctatacatgttctgtttaccgtctgcctgatcacctgttccgatgcacccagaattaccagtaacgtgaaggctaccgataacaacaagatttccatccgaaaaatctgcagttcttccgctcctccatacccattcagatactgccttcccactagttccggtatcagatatcgcagcagcagaaccgacaaaactgtccctgtaatacatccgggcactatcgtccgcatgatctgccggatatagatcttacggatctgctttttcgttgtaccgatcgtatgaagcagcgccatctgccggatatcgcccgacatggatatctgcatcacattgtagacaagtaagaatattccgcagataatcacaacggcctctactactgccatcccgtaacttcccgtcatctcttttacggcccgattcttcgccgtatctgtcgcaatgatctgttgggaattgtctttcatcggtacatcttcgtataatttttcttctgtatccttccagtccatggcattcgactgacagatcagaatatccgaaccttcttcgatatcatacccccagtccttcagtttcttttctgacacatatccgattgctttgcttcttccattatcttctgtataagcactgtaccagcctgataatttgaactcttctttttctgtctgaaaaaagctgatcgatatatcaagtgctatctccatccctcttttcggattatcaattccaagcttttttaatgtctttaccggaagcatgatttcctgctgctttttgggataggttccatggacaccggtataggcgggcttcatcatcttttcccatgcagtctgatccagcacttgtatggaacagatagattctttctttccggattctgtggcttcacccattttcattcttcttccggtttctcttacatatcctaaggaacgtgctttttcatattgctgctttgttccctcttctatgtaagtggatgccgttgttccatccatccgaatatttttcgtatattctgcatttatttttccgtaagccgttccaaagacaaatgtcagtgtaagaatacataaaacgactgctcccataagaatccggtttctgcttttattacattttctgatagcttccgaaagcagccggatcacgttcgtattattgttcggtgtaaatccattcatttcattacacctccgcattgtataatttcccgtcttctacacgcaggatacggtctgccatctgtgcgatcgcttcctgatgggtcacaacaatcaccgtctggtggaatcttgctgcacaagtcttcaacaatgaaattacttccatacttgtgacagagtccagatttcctgttggctcgtcacacaaaagtactgccggctttaccattaacgcccttgcaattgccactcgttgttgttgtccgccggacagttcttccgggagattctctaacttttctccaatctttaacgttctgacaatatcttccagcaatttttcatcaatctctgcaccatccagtctgagcggaagtacgatattctcatatacattgataacagggatcagattatactgttgaaatacgaatccgatattccttctcctgaatatcgtgcgttcatcttccgtcatatctttcagactgttgccgcgtatccagacgccacctgcagtgggttcatccaggccgcccaggatctgaagtaatgtcgtcttcccgcttcctgatgtaccgatgattgccaggaattccccttcttctacggacagactcactccgtccagcgcatggacttcgtaattatctgtcacataatatttctttaatcctgctgcttttatcatttccataagattttttctccttgcttataattgtgtccgtttcgtatcgtaactttcacttgtctcatacagcatacaggacaaatctaacaaacttctaacagactggaagatttatctcgatcatcagacctttttccgaatatctgttttttgcaatcataaatccgccatgaaggccgataatttttctcgccagataaagtccgattccataacctttctgtgtggtcacgttctttcctctgtagaatctctggaaaatcttatgctcttctcccttttcaattccaagcccattatcttttacagtaatctttgcatgcatttcattcttctggattctcatttctatgattccgccaggccggctgtatttcacggcattatccagaacattatcgattgcttccccaatccagttggcatcatgcggacagttgacttcttgcggcagctctatcctaaatgcaatctgtttttcttctgcccgcttttgaattcttccaagacagtttctcacggtctttaacagatctgtctcttcttttcgtacctgaatcatgttctgctcaagtctggacatcttcacgaatccttctgtcaggaattccagttgttgttctccggatctcattgcatttagatagttatccacattttcatccgtctttgtcccggttttactccattcttcctctaataattcctgatatgtcctgatattggcaaggggtgtccgcatctggtgtgcaatctctgaaatcagcttctggatctcatctttactcttctccgcagcttctgtccgtccatttaacatttcctggatccttaccagtctggattccagtcttgcatataatgtctcttcccctgcttttgtttcccggatcttttcctctcgcaatatcttttccatacattctgccaataacttaagttctttctgtctgcattttccctgataaacatatatggcagttccacccagaattactcctgccgttactgccactacgattattatgatattcattcttttctcttcctttttgtatctgccattactttttcagacgcactccagcttgtatcccaatccaaatacatttttcagatatatcggtgatcctgcatctgtttctatctttttccgcagccggttgatcgtaacactgacggtattatccactacaaactggccacccagtccccatacatattccaggatattttctttcgtcagtacatttccctgattgtacatcagatattccagtaactgatattctctggctgtaaggataatttccttttcgttcttgtatacttgcttcttatcaggaaataatattatttctccgcataccagttgtttttctctgttgttccgtccgatcactgcctctatgcgttttagaagcactttcatggaaaatggttttaccacataatcgtctgctcctgtgtcaaatgctgtcaacatatccgtttcttcgtctcttgctgtcaggaaaatggccggtatctctgccttttcccggatctttttgtaacatgcaagtccattgccgtccggaagtccaatgtcaatgagaagaaggctctcactgcctgtaattgtagtaagagcctcttgttttgtatatgcggatacggtctgatagcctgcgttttgcagtgctgttttgagtgcctgatgtaataatgtgtcgtcttctataattccgatcgtcatatattttctctccgatcactacgttctttccatatatttttccgtgtgtttattcatccatatcagtacgccaacacagataatgattgagatgatcgatcctgccggtgccgcacaccccatcggaaataatgtatccggaaaatgcgttgccgcataataagacagtgggattctcgcacatatgatagatatagaattgtggataaatgatacgatagacaagccatatgcataaaaatatccgcttaagcagaaatgtactcctgcaaatacacagtcccatgcataacttcgtaaatactgtcctccaagtatctgtactgccccgtcattcgtgaatagtccaacaaacggaacagatacaaactgcacaatcgttgccgcaactaatccatatcctactgtcatacataatacataccgcaatgtcaggcgtgcacggtcatgcttgcctgcaccaatattctgcgatgccagtgccgatatcgttgacaacatagaagacggtaccaagaacaggatccctatgatcttttccacaatacctaccgccgccgcatcatttaatccacgctggttggcaaatattgtgattgcaataaacgatatctggataaatccatcctgcagtgcaaccggcacaccgactttcaatatgtttttcatcgtatgtctcttcggacgaagatccgattttcttaatttgatccctgtgcccttttttatgaccacggtaagtgaaacaatgacactgactgcctgtgcgatggtcgttccaagtgctgctccggccgcatccagtcccatgactccgatgaacagataatccagaccgatattcgctgcgcatgctactgcaataaagtacatcggacttttggaatcaccgattccacggaagattgcactgataatattataagctgtaataaaaggaatcccgataaagcagattgtcagataacggatcgttccttctactgcctcggccggtgtcgacatcacactgacgatcggtctgactgccgccagtaatacgatcataagtatgatcgcaattcccatgaacatcgttgccgtgtttccaattgtctccgatgctttcttataatcttttgcaccgatgcagcgcccgatcataaccgtcgctcccatcgcaagccctacgatcataactgtcagcatatgcatgatctggcttccgatcgataccgccgtcgtactgctgaccccgccaaactgaccgacaataaataaatctgccataccatataacgtctgtaaaaagtacgataacagatatggcagtgaaaaataaatgactgtcttaaatacacttcctgttgttaaatctctctccatgttgtaacgtccttgtctttagaaatactcatttcataattctattcctattaacctggtaaatcaactttttaggaagatttttttgaaagagagtgattacttttatggtactaaaccgcaaggagccccatcgtccgcaatatgaatatcgtcacaaacaacgtaaatatcgaaagcaccgatgagaacacaaccagctgcccggcaagctgtccatccgctcccgcctgctgcgccatgatatagctggatactgcaaccggcgtctgatatgccagcaccccggacaacaggtccgcatcccggtaacccatcataaccaccatcggaatcatgataagcggcaagattaccagcttgatcgtcaataccacaaatgctgtttttaagtttccttttacttttgaaaagtccagatcaccacccagaatcataaacgcaatcggtgttgataatttggccagatcctgaaccgttgtattgacagctgtcggaagtctgatcccaagaagtgaaaatataatccctaataccgaagatatgatcagtggattctttataatatccagaatgatctttttccagtcattttcccttttttcaccgaagattgacagcgcgactactgcaaggaaattatacatcggtaccaggatggcacttaaaattgccgctgtcatcgtacttttcggtccatacatattctgtacgactgcaactccgaagatcacataattgctccggaaaattccctggataactacaccctgctgattttcctgtgttacgatccttggaacgatcagacacaacaatacgaacagtatcagaagtccccctgctgcccagatgcacagcctgatcctgctatgtatctcagaaccgatatcactctggtagacattgtagaataacatacatggtaaaaatatcttaaacacaatggcatttgcctgttttgtaagctttccgtccgccagagatgtataattgaccagaaaatatcctaataccataagaaaaaataccggtgcaattacattaaacgatacaattatattatccaaattttctcacttctctcattcttaataaatgctgtatttccctttggaatctacagcatcatactttttatttctgtatattttccagatatttacacatgaaatacgtactcatccagacgctcgaatgcttcttttactctgccaagcggtaatgcaagattcatacggattccatatttctggtggaacggtcttccgtcctgccatgcaacgcctacgtcccatcctgcttttaacagctcatccagtgacttataattttcctcacaccagtcttcgcagtccaggaacaacatataagttccctgcggcttacttacttcaattcctctgtagtagtcacggatatgattcactgcataatcaacattttcagataatacctggcaaagctcattgacccaggtatatccttctgcctcgtaagccccgatcagcgcatgcatagataatacattcattgtattataatgtgattttcttgattttgcctccacccggtcacgcagcattttgttgaagattatatgataacttcctaccagacctgccaggttaaatgtcttactcggtgcatacaatgcaatcgtacggtttcttgcatccggactgatcgactgtgtcggaatgtgctggctgccttttaagatcagatctgaccagatctcatctgcgatcactacacattcattgttcttatatacttccatcgcctcttcaatctctcggcgctcccatacacgtccggtcggattatgcggactacagaaaattgctacatggatgttatttgcctttaacttggcatccatgtcttcataatccatccgccagattcctttttcgtcttttttaagcggactgtgtacaatcttgtatccattctctgtgatgcatttggtgaatccgatgtaagtcgggctgtgaagaagtacggcatctcccggtgcggcaaaagctgtcagagcagagattactccgcctaatactccattctcatatccgatatattccggcatcagtccttctacattattgcggatcttatgccagcgtatgatcgaatcataatactcttccaccggactgaaatatccatatgccggatgtgctgccctgtccatgatcgcttttggaatcgttgggacagtttcaaagttcatgtctgccacccacatcgggatcacatcaaatccgtcttttggcggttccggtgcaaatcccggattctttccaagtccgtctactgcaatcgcatcttttccatgcctgtctataatctttgtaaaatcatatctcatatctttctctcctgtttcccgaaaacgatcttccaccggtgcctgccgtctgatcgctatttttttgaaaatacccacatcgcttttatctggtctttgatattggcaaatacccatgttgctttcgaattctttatgctgaacggatcattcactttcacattgccattctcataacctgtcagtacgataaaatgtccaatcttggtaaaatctcccggaccgacactgcatatgatcggatgtccctgcgaaagttctaaagctacctgctcttctgacaaaagacctgcagtactgttaagattccagtttgctccggcttcatccatgaatctccagtacgtgttattctcttcgtccacataaccatgttccgttccgtaagcagctacctttgccggagtgatcgacgcatcctgattcagtccggctgctaccatcgccatacaggtcggtccgcatccacttgccgctactatactggttccgtatggagcatacccccatcgttcatcccactgcaaaagttccggtatccctccctgcgaaagatcttttcctatcgtatctgcatacggcttatcttttttcttttcataatcggccacaaaatctactgtttccacatttttatccaacagttcgatcacatttttcggatatccgtgttccgttgcctgctttcgtatacgttccaatttctgttcggcagtttccggctttgactttacttttgccgcctcttttttatcctgcttttcttttctgagctcttctgctttctgtttttcttctacacattcacggtgcagactatagccagcaaaagcagcagttattactgctgctatcacaccgactactgttatacgccttaatatctgatttcttcttgcaccttttgaaagagaagttcttggtcgttgttctacgttattagtctccttcatctatcaattcagtcctcttaataataatctattttctcgacatcgttcttaattatacaacagcattccagcggatacaacttatcatttccttaatattgattctgacttttcgtatttgtgtcgtttttttatataattatgacttttttcaattttttttcattttttacttgctttttacattttaccatgatatcatactacttgtcttaaggacacgtcaaataacggggtgtggctcagcttggctagagcgcctggtttgggaccaggaggtcgcaggttcgaatcctgtcaccccgatttataatgtattatgcgggtgtagttcaatggtagaacaccagccttccaagctggatacgtgggttcgattcccatcacccgcttttttcatgctctattttagatttatctggcggcttctttcgaaccgcatagcgacaaacaacgaaccctgtcatcttccgggtgtcttcactaactttatgtgaagccacctgaaaaatgacagggttcgttatttttccaaattgttccctgtgccctaatctattttctttttcaaaaatgcaaatacagaaccgagcaaaatatagatatctgccagattggcggttatattgcccagtattttgtgactggatttaataccgatataatccactacctttcctctgacaacacggtcataagtattgcttaaagctcctgcgcttaagaatgtcagggctatcttactaagcatatgcccttccctaaaagcttctataattgtcagaagtccgatcgctgctgtcgtcatcaccgacgctttctttactttttccggttcggaatccatagagttaaatgcaaatcctttattatatacttttctgatcagaatccctgtcccacagagacttttttcttccgtctcgcttacattctcttctatgtactgttttacagccatatcaagagcgaacagtgttccgaccgcaccgggtatgcgtgtacgcatttatacttctccctggatctttacgatctcttcttcctgtttttctatctcttcgtcacgtttttctatctcttcgcagagcgttacataatccatgtctgacacttctccactctggaatttttcatataccatacgtccgatatctgcaagatctctttcattcgctctctttaacgaacgaacattgcttttaatcttctggatttccagagtatctcctgtcttctttgtgatgtcactagcaacatctgaaaccattctgccgaattcttcaaaaaaatctgccattagtatcctctccttatctcgttcttctttacagctgtcttaaaatatccaatgatcggtacaaattcatcgtcccatatccccattgtgtattcggatattctattcccggaagcttttgtgttcccatcacgataatatttctgacctgactggacgacactcctcttgcccccggctgctcactgatccattccatgatcagggcacatccgcctgctgcaatcgctgttgcggcgctcgaaccggtccgattcttaaattccccgccaggtactgctcctgtgaccgcttctcccggcgcagcataatccggttttattttttcatctctagtataccccctgcccgaattaatatcaactccattctccctgctgttataaaaagccacagtcattgtatttcttcctcctgaaggctctgtaaatgtagtgtcgggatttgattccagaaaatatacctctccctccaggaattcttccatcggaagccatatgtgaaaatctccggttgtctgcatcgccggctttatatctattttccatattccgggaaccgcattctgaaaccttataaataccagctgtgcatcattattcctctgtaataatctgtattccacagtaatcgttgtccgttcaaatgtaaataaaaaatcaaacagataccccagacgtatcggaatcatccccgtacgctctccagacggcgaagtaaccgacaccattacgatattcggaagtgtactccataattcaacggcaaaagactgtgtcccttctcctacccggatttctgctgtcctcatatcctgtgcatccgtaaaacggttaaaataatgatgtcttctggccgcctcattgcctgttccgactacaacacacctgtttcttaccgtcgcataaatgtccaatatatctgccagaatagaatctccgttatgtcctccaaagcttgttccgatggctacacagatcactaacggcattccctgttttcttgccaggtcattcagatagcggagtcccagcataatatcattttcctgataacatacggcatcctgtgctattgcgaaaaattctttcagataattttttgccggctttaatttgaccattgcaatagaagcctccggtgcggccccgagaaactgttttccaacttctgctcctcctgcagccgcacttgcaacaaatgttccatgtccgtctgtatccacactcggtactatctgaagcggatcctccgatctaagtgctgcattgatcatttcttccgtatattccgttccataataaagcccctgtggtgttcttcccgtctgaatcgtctgatcccagattcccacaatccgtgtcgtcccgtccagattgcgaaacacacgattctgataatctatcccggtatctaaaaagccgatcatgatcccatcccccatcagctgaagtgtcggatagttctgcaatgtaataattcccgctgcatctaacggctgcatatccagaagtgtataacattttgggatcgtactgtaccaatattctctgaacgataatggaagcagaatccttctgtctacagatacacttttatatccaaaatccatctcctgaatacacgcattttccggattcacttccttaagttcctcatctctgtataatggaataataaaatcccagtaatcttcggaaataatcttttctttacagttctcttccaaatcaaaaaaacctttcatatacatttgttttatgtatatgaaaggttccctgtcattcattaatcttttattatgaattcgtattctggttcagcatacgttcaataatgtctaccgactcttcaataccataacttgcactgttaaaacagatatcatagttcatagcatctccccatttctgaccggtataataattgtaatatcttgcatgttgacgatccagctttttaagcagacgtaccgctttcttatgatccagatcattgacctccataatacgacgcacacgctgttcgaacggtgccgtaataaaaatactgatatgtggaatatggttattcgcaagtatcacatctgcacatctacccattacaataaaatcttcttcttttgccattttgcagatcaggtcactctgattgaagaagatcgcgtcttctcttgtcaatccatgatagcggtcaaagtctttcagacgctctttgatcgtccttccggatccctgatatttgttctcgatcagatccgttcccagatccgccacatctgtcacagaatccttctccgcatccagtcttcttaatacttcattaaagatttctgcatcatagtagttgattctaagtgcatctgccagtgcaaatccaatatcatttccggcacttccctgcgttcttccgatacaaataataagatgatcgtcttttgaaaacttctgacgcagattcgctgtattcaacttcgccctgttttcatccagaatttcaaccttaccgaaacttgcaggaagctctgctatttcctttaatatctcatcgtattttttcatcagtctggaacggtcttcatcctttcggatcgtacgtgccatgttactgatcaatgccagctcacttctaagaagatgtccctgcggcttggtacgcatcagcataaccagattgttcacacaggtacgtttatctcctgtaaaggtacggcccagagaagatcctacacattcatatacttctccgtccagatcatagatccgttctgcaatgtcataatatttattcttattctcctgcattttccgcacccccttctataaaaagaatatcaacatatcgataataaataccggtatcaaaaatgtcagtgaccatgccatatatccaaagaacgacggcatacgcacaccgttttcatccgacatagattttaccataaagttcggtgcatttcctatatatgtatttgctcccatgaatacagcaccacacgagattgcctccagcatcttaaccggaacagcaccaagcgttgttgccacaccgcccttgaatccaagtgctcctgctgttgtaaggaacacaagatatgtcggcgtattatcaagaaaacttgacagagctcctgtagcccagaacatctggaatggtttgctgattccaagctccgctccattcgctttcaggatcataagtgccggctgcatagtaataaagattccgataaacagaaccgcaacttcctggattgcaccccaggtaaagtggttacggatacggacttcttcgttcgtcgtcttaaacgataagaatgcagccagaaggatgatcacaacctcaattattgacgggaatccaagtgtaacttctccaaggatatgaagtccttttacggttccgtctgcattctggaatgcggacattcccggaagtgttccacttaagatcacggctccgacgatcatcgctacatagataagattatgaagtcctacaattttaaaatgtgttcccggctctctgatatccggttttcttccttctgcaatatcttttctgtatgctcttctgtccaggaaatagaatatcaccagaaggatcaccatattaaaaaccagaatatggaataacttcatactccagaaaaaaggtaccccacgcatgaatcccatcagaagcggcggatctccgatcggtgtcagacatcctcccatattagagatcaggaagataaagaagatcatgatatgactctttctctttctccatgaattcatcttaataaacggacgtacaagaagcatacttgatcctgtagttccgatcacactggaaagcagtgtaccaaaaacaaacaacgccgtattaatcctcggtgatccggcaaattcaccgtcaatcgtaatgttacctgctacacagaataatccaaacagtaaaacgataaatgtcagataatcatttaccacacattccagaacagtctcactcattgtaaatattccatatttcgctgtaaaaggaataataaacaagattgaccagaatgcaactgccagcggctgatgtttttcccaccagtccggcttgaacagcggcattaccgcaatactaagcaacagccctgcaaagggtatgcagagccagattggaatagctgataattcccccatcgctgtctttcctccattcttctccaagtaaaaaaattatataatagtttatatgtaaaatgtattattgaagtcttggtacttcctgacctctcaacataattaccggtcctccggttccttcgatatattccttcgtgatgataacctctccgatattgtcatccttcgggatttcatacatgatatccagcatgaattcttcaatgatcgcacgaagtgctcttgctccggtatctttcttcaatgccttcttcgcaattgcatgaagagcatcgtcattgaattccagttttacctcatccaatgccagcagtttctgatactgttttaatattgcattcttaggttcttttaaaatctctaccagcatctcttcactcataccctgtaaagtgaacacgatcggcagacgtcctaagaactcaggaatcattccaaatgcacgtaaatcttctgttgttactttcttcagtatctctttatcgttattatacttgtctcttaagtctgctccaaaaccaattgctgcctgtttggtcagacgctctttgatgattccgttaagatccgggaacgctccgccgcagatgaagagaatatttcttgtattcacggttgtaagcggaaccatggcatttttactggttgcgccgacaggtacttctacatcgcttccttcaagaagttttaacattccctgctgtaccgactcaccgcttacgtctctctgacttgaattcttcttctttgcgatcttatcgatctcatcgataaagatgattccctgttctgccttctctacatcattatctgcagctgcaagcagtttggaaaccacactctcaatatcatctccgatatatccggcttccgtaagtgaagtcgcatctgtgatcgcaagcggtacatccagaatctttgccagtgtttttaccagatacgtcttaccggaacctgtaggtccgatcatgagcatattggacttttcaatctcaatatcatccatagaatcagtagccacacgtttataatgattataaacagctacagacataactttctttgcatattcctgacctaccacatactcatccagttttgccttgatcttatgtggtgccggaagattcttgatatctactaatggtttatattcttcgccctcttttttctttttgatcttctgctgctttggaatactctgttccatatcagccatattaaatacctgtactcccggaatattcatcagctgactgtaatcaatcgggccatttgacattgcatcaaagcttttctgcatacagtcattgcagacacagatatgattcggaagttcaatcatttttcctgcaacgctctctggacgtctgcagataaagcagactttttcatatccatcgtcattattttgtttcttattatctgtatcagatgtattctttattgtctcaacctctacatcttctactttttcaatttcctgattgttattatcatcctgatttgccattattctctccttcttaacgtagtttacgcatttcactctgacttttatcctgcttttatgcttccccctgatttaccagttccagaaatgtctcttctgaaataatcggtattcccagctcattcgcttttttattcttggatgacgtactcgtcacatcattattgatcagatagtttgtctttgatgtgactgatccagtcacttttccacccagactttcaatcagctcttttacttctccacgattggcaaaatgctttacgcttccggtaattacaaaattaacgccttcaaaaatctgctgttttgttacagtctcttccggaatggtcagctcatttaaaagccttctgaaattctccacatgttttgcatctgcaaaatatccgacgaacgcttttgccagaacctctccgactccctgaatctcatttaattcttcttccgaaaccttcagaagagattctacatcatattttaattctctgcaaataacttttgcattggcaagtccgattcctgcaattcccagagaataaatgactctcggcagggtcgtcgttcttgccttttctatactttctgtcagttttttatatgatttttctccgaatccttccatcttttgaattttttctttgtattgatccagatggaagatgtctgcaaatgtatgaatatatcctctggaaataaatttttccagtgttgcttctgataatccttctatattaagtgcatccctgctgacaaacagtgcaaatgatttgacgtgcttcgcctgacattccggattcatacagtacaatgcttttgcgttgccgacctgccggatctttgtctctccctgacagacaggacatttacacggaatatcttttactccgcttcttgtcagattctctgcaatctgcgggatgatcatattagccttatatacttcaatcctgtcaccgatcccaagttccagttcttccataatactgatattgtgaacacttgcacggcttactgttgttccctcaagttctaccggatcaaagattgcaaccggattgatcagtccggttctcgacggactccactcaatctctcttaatactgtctctctgatctcatcctgccatttgaacgcaaaagaatccctcggaaattttgcagttcttccaagcgaccgtccatacgctatatcatcatatgttaacacaagtccatccgacgggaaatcattttcactgatcttagacgaaaatttagcaacttcgtcctcaacagtatctctggtcaccatataatactccactgttgtaaatccctgtgacttcagccattccatctgacaggctctggaattctgaaaatcaactccgtctgcctgcaccagtgtaaatgcatagaacattacattacgtttagccgtgatctggttattcagctgtctgacagaaccgctgcacaaatttcttggattcttgtacctggcatctacatcttcaatctcctgattgattttttcaaaatccttatatcctatgactgcttctcctcttaagatcagttctccctgatatgcaatctggaccggcacatttttgaatactttcgcattgttcgtgatcacttctccgacttctccgttacctctggtgaccgccttataaagctttccatcacgataagtcagtacaaccgtcagaccatccatcttccatgatatcagaacttcctgatctcccacaaagttcttaagttcttctacttctttcgtcttatccagagaaagcatcgggctttcatgtctttctttcggcagttcgcttaccacttcatatccgacatttaccgtcggactgtttgacaaggtaataccaagctcatcctcaagctccttaagttcatcatacaatctgtcatattcataattactcatgatctcctgtgcttcctgatagtatgctctggaagctttattcagaaggctgaccagttctttcattctctcgttctttgactgtcccatataattcttttaactcctgttctgttaatcctcttacctctcccggtttcagattacctagttctacattcataatgcggattctcttcagtgttgtcaccttatagccaagtgcctcacacatcctgcggatctgtctgttaaggccctgcgtcagaataatggaaaatgtgtattttccattctttctcactttacacggcctggtcaccgcatccaggttcttctccctgtctctgatatgtactccgcgactcatttcttctatgaactccggtgtgatttctttattaactgtgaccttatattctttctcatgggagaatcttgcacgcatcatgccattgatcagatcaccatcattggtcatgatcagaagtccttccgaatctttatccagtcttcccgcataggtcacgcgtagcggataattcaggaatctgataatattcttcttttcccttttatcttctgtgcaaacaatcccagcgggtttatataccgccaggactgtcttttttgtcttgctttttatccgttttttccccacacagacttcctgtccgtcttcaaccttcattccgggtacggcattttttccatccaccgttacaacgccggattctatcagccggtccgcctctcttcttgagcacacaccggcttcgcttaaatatttattcagcctaatcattctgtaataccccgctgatactgttatcttttacaaaagtatttccattatataaaaataatacacttgtgatattatccttcttcatgaccttttcaatatcatcataataataccttggatcgacaaccacaatttccctgtaataaggtatcaggaacggaatcagactattggcataagaatccttgatgatcagaagcctgtctgtcgaatctgccgtcgtcttgatgtcaaggatcggataatttccgccaagaaaaagtgcatatttgtcttttcctttaagcttggaagtatcataaagagttgccgtcttctttttttcatttacattatttactacagcctctgttgcattcttaagattgtcgggtgcatagatatatatcggttcttcatatcccgtttcatatccgctcgtcgaagccagtgttccgttaaatgcattggtcaccgcataaggcttcatgtcagaggttttggatgtatcaagcttcatgctttttgaaagagcctgataaccgtaatacgcgccaagtgttgtccagtgatgatctgtgtgataatagatttcttctgatctgtgtttttttaaaatatcactgacatccacccatgtataaacagatcccagtgtactgtgaattgctttaaattgcttctcctgattctctgtaactgcatatcccggaagtttatccgattcgatattagccgcattcggaaccagcatcatgtacattggtatatctttatattgtttttgaaacattttcattgcagacagattttctttcatctgatcttcatccggttttgcaatatcctccagaagataatggtcttttcctttgaacacgccattcgcttttctctttcctgccagcagatccaccctgctttttagcattacccagaaatctcttcccgcgaactgatctgatacataggattcgtactgctccatccatcttccgctttctattcctgaaattgtaagttccggtctctgttccagtgcccggttctctgtcgccgagaattcccggtcacccgttgccagattcacaacacagaaagcgatcatcattatgacaaatatcaccgctgctaatttatttctatgcacttctcttcttctttcccatttttttcttgactgtctcatttttactcctaaaatctgaaatacaggaacggattatatgtctctgtcactagatatgcgatacacaaaatgaacagtaccgcatatacgattccattcagaagcgtcgtattccacttcttctggcgcagcatatgctgatatctgacatctgtaagcggagtagaaccaatgatcagaatgatccacaataccagattcgttgtaagtagatacaggctttccctgtctgccactccgtgtgctcctgctccaaacatcattcccagatatctggccgcccctccaagtgaaggactaaagaataatacccatccgatcacaaccagcacaatactgtaaatatggcgtacaaccgaagggagtttatccagtaccggtgacaggatatatttttcaatgatcagtatgatcccgtaatacaatccccatgccacgaaattccatgcagctccgtgccataatccggtcagaaaccatacaaccattagattgaagatatgccggctcttcgatactctgttgcccccgagcggaatgtatacataatccctgaaccagctgctcagagaaatatgccatctgcgccagaattcagtaatacttttcgctatgtacggataattaaaattcatacagaactcaaatccaaacatctttccaagtcccactgccatatccgaataaccactgaaatcaaaataaatctgaaacatataggcaaaagcaccaagccatgcactcagtaccgacacattgccctttccaagtccggttacttccgtaaatatcataccagaagtattcgcaagcaataccttttttgcaagtccacgtataaaatacatgcacccttctccgaacttgtcccatgatgattcgcggtttacaagctgctcttcaacatctgcatactgtacgatcggtcctgcgataagttgcggaaacattgttacatataatgcaaagttcaggatattcttctgaactttaacatttccccgataaacatctataatataagacaatatctggaatgtataaaatgagataccgatcggcagtgccagcggatgatatgtaatatgcaccggcagcaccgcattcagtgaatccagcacaaagccttcatatttgaaaaatcccaggattgcaatgttcaccacaatattgaatataaggcttctttttgccagccttctgtccgtcagatttcttgctatatcaagtccactgaaataattgaacaaaatggataacagcatcaggaaaatatagaccggttccccccatgcataaaaaatcagacttgcaagcagcaaaaccggattgtggaatctctccggcagcaggtaatacaacaccaacacagccggtaaaaatgtaaataaaaaaacaatactgctaaataacatctttctaattcctctgccttctaataaatactattcttaaatgcggcttctatgcgatccgcatcttttgaaacagctaataatatgtaataccccctggtttcatcgattgcagaatgaagaagcctggtctgttttacaccatagccctcaaaactcttcttctgtgtagacaaacgctcctctacagccttctccacatcttctacctggctcttatcttttacttttactaccagtatctcatttacactcatgacatcatccggtatatacaacattgttccggcataatcgttggcattcagaccataatacttcttaaggtcctgagaacttccctttttcatgcctttcagcgaaacagatttttcaatattcttttgtatcgtatctacggatacggtattatctccctctccggaaaccagcaataccacataggcaatcagtgcgatcaccatcagatacttacatgtattaataatatccagtcttccttttctcattataatcctgctgcctccgccatatgatctacccatctcgtataataagatggtgacatatggatcccatcatcggcataatactcctgttttaccagatctgtattatcgatgaatgtcactttttcttttttacataattttttcagtttttgattgaactttggaacattggcaaataaaggtcttgtttcaatcgccgactgcgccgccggaagaatacaattgacataaatcttcgtatccggcagggactctttcagatcctctataacatttttatatgctttcacaaatccggacgcatttccattctgtgcttcgatatcattcattccataggcaagaaacagcacttccggcttcatctctttggctttttttatatgttcctcaatctttttactgctgacttccgaaacttccgttccgcggtctgcctgtacattcgcctcatccagcactccgtactcatataagccctgtgtgatcgaatctccaaggatcagacaatccgcaaacttttcgcttacggatctgttatctgctgcttcttccttcacacgttcttcctcttcaagtttctggatttttttatttacttttccgacatccgtacgatccatctcactcaggatcttcctgcctttcgttgtgtcctgctttggattattaagccttactgctacaacgattcctccaagcacaatgatcactgttgccagaattactgcagtcctaagcacatgatccttttctttttccggaatctctgccggctgtttagcttccttctcctcagaatttttattatctatttccaaaaaaattcctctcttctacatttctttttgttcataaatatatattcaacttattttactgttttttcattcccatgtcaatttatatcaatttttgtgctataatacagattacatttatttttatccggaggttattccttatgaacgtataccagttatcagccaaaaattgtatgtcccatcttcttttaaaggatacttttgatacatttctctttatcgaaggagaattcactacatttaacaaattcaccataagcggttatctccaggaagacttcttcgacgaaaaactggaagagacttactcccgctgggaaaagatccgtgacttctgcttccagatcatccgtggcaaacgcactcctctgaacttcaagattgtccttgctctcccggacgatcagattcctgccttcctgacagcccacggcctgaccgcttaccgcccggaagacattcagggactctacctcaatttccactacgatggaagcaccctccaatgcatcaccggcacttccctcaaaaccttttctatggataagtccatcgaaagagaatgggataccgaagtaaaatccatcttaaaatccaaaaatatcgaaggcgaatactagaatacaaacaaaaaccatgcaactatggatttctctttccacagctgcatggtcttctttacttcaactctctgccagacttacttcgtaagcagcatcataatctcattacttctctttacaaacgctgtcatctcttcaggattcaatggcttatgtgccagcattgccagatcatacaactgtttgcagataatacttgtattctcgctgcccttatgatcaactacatactgaaccagcggatgatttgcattcaggatcagtgtacttgttgtacccatatccattccgctcatgccgtacatcttcatcatttcctgcatacggcggttctcttcagataatgtcatcatagaagctatattttcatcttttaatttttcgatcttaacatccagtttctcgtcaccaagctctttacggaagatttctaccaggctgtcagatgtcttctggaatgcttctttttcctcttcggcaacttcttcttttgctcctgctgttacatctgcatcaattctctggaacttgatgttctgattgcgctgctctaactgtgtaataaacggtgaatcaatattgtggccgaggattactgcatccatgccctgtttcttaaacatattgatgtactggctctgctggatctcatcggttacatagtagatgatcgtcttgtcttcttctttcttctctgtgttctgatcatctgctttgttgtcctctgtcttggcattcggatcttctacggttccaccatttgcctcgatacagtctttcagtgtcagatacttgtgatccagattcttgaacagaaccgcgtctttcatcttgtcacagaacttttcatctttcaggcatccgaacttgatgaacggactgatgttatcccagtatttctcatagtcttctctctttgtcttgcacattccggaaagcttgtctgcaaccttcttggaaatgtattcagagatcttattcacaaatccgtcattctgtaatgcgctacgtgatacgttaagcggcagatccggacaatcgatgactccctttaataccatcagatattccggaatgacttctttgatattgtccgcgataaatacctggttgttgtataacttaattgttccttcaatagaatcatactctgtgttgattcttgggaagtacaaaattccttttaaattaaatggataatccatgttcaggtgaatccagaacagtggctctttgtaatccatgaatactttgcggtagaagttcagataatcttcatcactgcattcattcggatgctttgtccacagtgggtggatatcacttaatgaaaccggacgttttttgatctttactttttctttggcaggttctgtctctaccatttctttctcgccgttttcattctctttttcttccatcttggcatcttcgtgaatatgctcgattacttcatcatcatctttcagatctgcttcgtcgatcgtctcatattcaggctctgcatttgccttggaaaggaagatttctaccggcataaatgaacaatatttctccagaacttctctcattctgtattcattagcgaactccaggctgtcctcattcagatacagggtcattgtagatccgacttcctgtttgtcgccttcttccatctcatactcagttccgccgttgcttacccagtgtaccggttttgcgccttctttgtaagagagtgtatcgatatgcacctcatctgctaccataaatgcagaatagaatccaagaccgaaatgtccgatcatatcatcttctgttgtcttatctttatatttttcaaggaactgtgtagctcctgaaaatgcaatctgtgtaatatattcttctacttcatcggctgtcattccaagaccgttatctgtaaatttcagagttttttcttctggattaacctcaactttgatcgccggtttgtaatcatccggtaactggtattcacccatcatatccagcttcttcagttttgtgatcgcatcacatccattggaaaccaactcacgcgcgaaaatatcgtgatcggaatatacccattttttaatgatcgggaaaatgttttcactgctgattgacaaactacctttctttgctgccattgtaaatcactcctatttctacttttatatttctatcatattagtgacaaaagatgccgtattgccgactggcccacatctttttgttacatttttcatctaacagatatgataatactgcatattttaaaagtcaatagaaaattagcactcttccaaaaagagtgctaacaattctatgaaatttataaaccatttataaactttgatatttttatgatattttcgccgaatatccttatattaatattatatgtgccgtaccattttcccggctactctatgcttttcaatgattctaccatgtcaattttctttaacttgaaatacattacccagtttacgaataatgaaaatcctatcgtaaataaaaagctgtagatataactcggaagataaatgcttcgtccaaacatcgccgcatccacttccaccgtctgaattacgaacagatgcaggactttaccgaatatcacacctacgaaagctccaataagcgtcagcaggatattttcccggaatacatattccgctacttcaacatcatagaagccaagcactttcaaagttgcaagctctctctgacgctctgtaatgttaatactgttcagattataaagtactacgaacgcaagcattcccgccgaaacgatcaggactatgatcaccagattcaggctggcaagcatatcatccagctgatccttaatatcatgcagataagagattgtcagtacctgatctttcgcaaggattttttctccggcttttttcacctgttcttctgaatatccatcctttgcccggaacatgatacagttatattctgctgtctttccatatactttcttataatactgcggcgtaaaatatatgtaatgtcccatatagttctcacagatatgcgcaatttttactgtgacaccttttgccataccgtccttaagatttatcgtatctccttcttttacattcagaagttttgccgtcttctcactgacaattgcaccattgtctgtaagtttgtatgattctttcgtcttcctgtcatggaaatcttcatattttccgacaatatccggattgccaagtacgcactgataaacgctgcgttttttattttcctttgatgccgtcacgctctgcatcctcgcatccatataagtctgaatatccgtatcttctttcagatattccttcaactcttctttctctgtctttgttacatcatccttgtagaaaatgtgcccgtcatacagttggatctcatcgtactgaatatctgcaatctcatataccgaatcctttactccatatccaaccagcatcagtgccatacagccgccaattccgaatatcgtcataaagaaacgttttttataacgcatcaggtttcggattgttgatttccatgtgaaattcattcgtttccagataaatccgattctttccaggagcactcttcttcccttttttggtgccggcggacgcatcagcacagccggttctgcagccagttctttatagcaggatgcaagtgtcgctcccatggtacacacgatcgaagcggccgatgccatcaccgcataactcatatgatatggtacataaatcttcggaatatgcggatacataatctcatatgcataaatgataatatacggcaagatcttttctcctgtcagcactcccagaatacttcctcccgctgttgcaagaaacgcgtatcccagatacttggaagcaatagaaaaattaccgtatcccagtgctttcattgtaccgatctcaattctctgctcttccaccatacgggtcataccggtcagactgatcagagctgcaactaagaagaacatcacaggaaatacttttccgattgcacgcatacggtttgcattttccccaaatccatcatattctaccagtgtacttctattgtatacataccattttggattttttatcttcttaatctgttcttttgcatcagcaagctttttctcaccttttgcgatttcttcctcagacgtctcttttccgtcctcatattcttttctcgcatcggcaagtttggcttcattttgagcaatttctgtctcgccattttgcaatgtctgttcctgtgctttcaactctgctttaccggcatctaattgtttctgtccggattctatacttgcggctgcactggtaagctttgcttcactggcgtccagcttcgcttttgcctggtcaagctcggctttcccacttgcgagcttttgctttgctgcatcaagtccggccttctgggtctgataatcctgttcttttgcatccagtgtcttcttggtctcctgcgcctgcagctccattacctggatcttctgtaataattcctgatcctggttgggattctcctgatcctggttgggattctcctgatccggattctgtcccgaaccgcctgctgcctgtgcttttagtgcctcaatcgtattcagaagagtctgatatcccgcccagcctttatccagttcggctctgtatgtaaccaggccttcctctcctgcctgaatctttgcctgcgcttctgcatactgggaatcatacgcagcttttccttgttcgtactgtttctttccctgggaaagctctttcaatccattttgatacgtctttttcgcctgatccaattctttttgttttgtatctatcgtctgctttgctgctgcaatctgcgactttccactcgcgatcttttcttttgcctgcgaaacctgcgtctctccatcggtaatctgctttttggcatcctcaagcttctgcttcgattccgctttgccatcatccagctttttctgcgctttcgcaagtttttcatttgccttatcttcaagttccgacttccggatctttcctctttcttctgtgattgcttcgattctcttttggacggtctttactttctctttatataccttcgtataagcagtcagatcttttgcacctgccacctgtacgtacatttccgtatacacatccagatcaaaggttttctccggaaccactacgaatccgcttatcgtaccggttccaatggttgtgcttcctcggctcagtgaaatgtagtatggggaatttccttttccgactacttttaattcgtccgtcttcaatgtatctgtcaccttgtcatctgttccggactttaattttatcgtctcgccgattttataattcatctggtcatcaaccagacattcccctgctttttccggcatacgtccttcccttaccgtgatcttattcatatcctccatcgctgacatcacatgaagtacatattgtttcttattctttatattcaggaaatctgcactgtaggcaccttcagcctttcccactccctttacgtttccgaccgcacttacatcctctttcgtaattccaagcgtactgacagccttaatgtccatcagatccgattcatcaaaatacgcatctcccgtaattctcatagatggttccgatgcccggattccagaaaagaacgcaacacccaaagcaacaataaaaagaattgaaataaaacggccaaaattccgtcggatctccatgtaaaaattctttcgtgttatctttcttgccatctgttatcctcacctctttgtcttaccattctatggtctcaaccggaaccggctgcggattttcgatgatcttatcaacccgtccgttcttgatcttgatcacccggtctgccatcggtgctattgccgagttatgtgtgatcagtataactgtcataccattgttccggcatgtatcctgaagtaatttcaaaatggatttgcctgtattgtaatcaagcgctcccgttggttcatcacagagtaataatttcggattcttcgcaagtgcccttgcaatcgacactctctgctgttctcctcctgataactgagcaggaaaattatccagacggtctccaagtcctacttcttccaatacctcttttgcatccatcggattcttacatatctggagtgcaagctccacattctccagtgctgtcagattcggtatcagattataaaactggaacacgaatccgatatcgtctcttctatatgcagtcagctgcttcgttgaatacgtagcaatatcctgcccatctaccagcacctgcccctcagatgccgtatccatgccgccaagaatattaagaactgtggttttcccggctccactcggaccaacaacaactgcaaattctccctttttaatctcaaaatcaattcctgcggccgccatgatctcaacttcgcccatctgatatatcttcttaacatctttcaaagtcacaaattcactcatgcatacttcctccgtgtgcgtatattcgtatgtcaattataccatctttttcgtggaaaccataggggcgattttctatttaatgcattaagcggttgatacccggccggaagaaaaggaagagagtcccgctgcgtgctgattcaatcattcacattatattttagtattctataaacctacgattttatcatcaatctgagaggtttacacagaataatttacactacccagccaggctatgtattactcttttgcttcctccattttttgtatttcttgttctgattgttttatctgttcatccaactgtcttatctgcctatcgctttcttttatctgttcatccaactgtcctatctgcctatcgctttcttttatctgttcatccagttgtcttatttgcttatcactttcttttatttgtttattccgttgtcttatctgttcatccagttgtcttgactgctcatctttctgttttatctgctcatctagttgttttatctgctcatctttctcttctatctgcctccgcatatcttcaatcatgaattctactgtatttcgatctaattctaacaattcttccgaaaacatctacatcacctctttcaactgactagttatttttataagtatctaaaacaattcttttgacatttttcatgctattttttatccaatagctgctgtaatcgttgtatttctttcctcatttctaacatctcctcatccttctgactcaactgctctctctggcagtctatctccttctgcatatcatcaatcatcagctttactgtattcctgtctaactccagcaattctttcgaaaacatctgcatcacctcttcgatattccggcagacatcataagcctgttcatacatttctttaaaatccggatatttctctataatatctataatcgtctccggatcatccatgcagaaaaatgcaagccatgcttccagccggttttctatttttacacttctattttcattttgctgattctttttgaatatgtcaagaggtatgaacagatattcttgtaataaatttatatttactcctgtatcagatttttgcataaaacgatggatataattattggaaaatttctggaattctgttggacttttttcaaataacacgatcgtatacacctgcttgatatctctgtaagagaatcgttttcctttgattcctctcactctcttatactgccgaagcaacagatctgctgagtaacaggcacttctttctcccggaaaatagtatccgattttctgaatttccaggttcgcaatacttccatcttccagttgtactaccatatctgtaataagaagcgtagattcatctgctaatcttgttccgtcatttggtaatacgtctacaattctcactctttgtccgagaagtaacgtgagtaattcatttactctctccgatgtattctccggattcagaatttcttttatcatgaaatcatacatgatttttatacctttcactccggtacaaaaatccagaaattcattttgattttcctctgtccactcataaaataaattttttaatctgcttttactttcaatctcattcaacacctcctcccttgtccgaatcatcgggaaatactgttgaagtttgtttgtcataggcacgtcctcctgaatagattataaaattttcgtgttctctcaagtcggaaatatgtttcagacatttttaggtgtgaaacggtcgaaacttgatgccttttggcctagaaatacttaagagtttgtagaagtcactctttgaagtgcattcagaatagcatattgttcatatgattacaagattaattttcgtaaaaaaagcggcagaattatcttccgccgcatagcccatatcaccatctatatattatctcatcttaaaacttctccatctccccaatgatcgttctgtaaaattcttcttccgtgccctcttttctcacatcattcatcacatatccgtctttcagaaatatcactctcttacaccggcttgccatctgtggatcatgcgttaccatcagaagggtcttccctaactcctcattgattttccggaattcctccgcaacaacttttccggattttgagtcgaggtttcccgtcggctcatctgcaaatatgatactcggatcattgatcagcgccctgcagattgccactctctgccgctcaccgccggacagttcataaggattcttttcctgaagatgttcaatcccaaactgcttttccaatgcttccgctttctcttcacattctttctgttcctttttatccagcaataccggaagcatgatattttcttttaccgaaagactgtccatcagattaaaatcctggaatacaaatccgatctttctacgtctgatatccgtaagttcttctttccacagctcattcgtattcgcaccgtcaaagatcacatctccgtccgtctgctgatccataaatcccaggatcttcagaagtgttgtctttccacagccggattttcccataattccgacgtactctccctgttctacatcaaagttaatgcctttcagtaccgaaatcgcatccgcatcatcaatctccccaccggcttttggaaatttcttgatcaggttatttacctttaatatttctttcatgctttccttctacctttcttattgtatactgctcaatcacctttacaccgatgccctgcactacaagatatataactgcaaagatcaacagatatcgcagataatgtacacagtcagccttcgtatattcccgcatgttccatatctccccggttaacaccggcaccataacaaccgcaactgctgcagggatccagaaaaagattcccgtctctgtccggatcagcttttctctttctttcgagctcattccaatacaggttaagaaatgattccgcttcttcttgtccgtcatctcagattcatatttcaagtaaatgaccagaacgcttcccagcagaaatgctcccatgataaatatatctactaccgttgtcataaagcgttcgctttcaatctgttccatcgttgtacgtttggaatagcaggataatacatccttgtcaaatctttcatcctctttatgtaccttccgaaaagcctggagctctttttctatcttctgataatctgcatttttcacattcaaaaggacaagctttgtcggccagtgatggatcgtcactccttcttctgcttcaccctcctcaaccggatctccggtgatccaattatatttcttccagtcgtcctgaaccttttcaaaatatttatccgaaaatacaaccagattctcctcacttccctgccggaatgcacctgtcagaatatccgtcttttcaccctttacggttcgtgtcggatagatcttttcccgatcaagaaatccataagattctatcggctgtccgatgtgcaggtacggctcttttctcgaattcaggtaatccagtggatgtgccttcgtactcttatcctgttggtaaataatatagatttcctttccgtcagcagatagattcattttttcacttttctttccaagtgccttattcagttctttatacgtcgtctccgagatgcctatatgctgtccctgcggcatgatcactgctctggcatcatccagcttttccgaattatccacattcgtcacgcgtaccatcggatactcctggaatttcacgtcatatttttcctgcagctgtttccagaatgtctcatccgcttccgttgccatacatacaaaatcatacgggaacagtccttccggcttttgcgcgatcttcgctgagatcatatcttttccaaataagaacaatatcagtaccggtataagactgatcacgtacacataacggaatgtactcttgaaacggtaataaaacgaattatatgggatcaactttgcataataactctttttatgcttccgcactttcaggaacaatccaaatccaaacttttccgccagataaatgcccaggaagataaataaaagtatccgtaacccttcggcattcttccgcattccgaaattcacgattccaaataccacaatgaccaggccaattgtaagccacagaccgatccgtttttccggcatcttctccttttccacatcgcccagctgcattttttttagttccctgtacaggaagaaatcccgcaggatcatcagtccaatcccggatattccgatcaggataagacttgcaatcaaatatgtgaatcctgtaatcttcgccggctgtgctcccactccggatcttgccatgaagattctgcggatgatacacaggatcacacttccgatgcaggctcccccgatcagcattcccagaattccagccacaatctcttctccaagcacttcataaagtgtagacttccgcattcccagagtcgaaaatatactgtaatttctcatccgttttctgaaatatgacaacagattcgtgatcatcagcatcagcgatgcgatcagactcacgatcaggaattccagcagaattgccgtgattccatgccccgtcagtatatttccttctttattgaatggtgccagcatctgtgccattccgactccggaaaatatcagcgtcgccggaagcaggttcatacttacgtaaacaataaaatctctttttgaacttttaaaattcttccacagggccgtatagaatcctttcggatacttccccaaaaattccagatgctttttcttttcttctttgtaatttttctctctgtctttaacttcttcctgtatctttttctcttcctgccacgaatcaatcagcttcgcaccgatcaaattgatcaccagaagcactaccagtaaaaatggatacacctgtgacagcggatctgaaaatactgccccatctgccccaagaaatgatatcatacatcctgcgatcagtgacatgatatccagaagcagtttatggtgattgcttaaagccagtatcagattcacaattcctatcacctggattaccagtaccattaccagttcacagatgaacagcatcagtatctgaaccatcatctgttcatctgcaccgtccagtactcccaaaggcttcagacttttctttatgtaactcatcccatcgcccgaagcagccaattttatcagatattccggcacattgcatttccatgtccccatgttcatccacggaaataatagcactgcctggatgatcacctgcatgatcagcgtgaatatcttcattcgcttttccgtcttattcataacttttgcctctcatttttcatacacgcttattatccgagatctaacgtctctctctttatacgcttactatccaagatctaacgtctctctctttatacctgcgccaccaccggcttaaatccctccattcctacaaccatcaccggtgctcctgccgggatctccgttcctttctcagatccctgtactcttactttcatatgatgtccacacagatatccttttcccttccagttgattctggtatctgccgttccaatctcccataaaagtctggtctctcttctgctctgcaaaagattcataaatcctctcagtaccatattcagcagacatgctatcaatacacagcagagaattcctgcatatcccttcaccgggaagctcggagcaaaacataatgccgagataaaaagtaccagcccgctatttgcaacgtaacatccctgcccccagtctcttccgactgcatagaataaagctttgcccgtgtatttctcccagaagctcaatccaattccatagacagctaatccgattccgatattccggtgtataactgccgggattttattcaggccaagcgcatcattccacaaccataaatatgcgttcggatctcttgcgataagataagaaatgcacacacatacaatcggtatacatcccagtgccagcatccacagaaacatattggaatcaaacactttatgatagatcttatccattgcttcacctgcttcctgcggatcgcccatctggcggactgcttcttcctctgcttcaacttctgtcatccctgattccattaatgcggctttgcagtcttctatatgcgcttcatattcatttacaatctcttttcttacagacgaatcggtaatcttcttcccaagttctttcagatattctctttccttcatatctaacaccgtccttttctgccaccttcactgccttacctgtgctatacggaatactggatcatgctcgtaactgcattggcataagcattccattcttcaatcattttctccagatatttcttcccgttaggtgtgatccggtaatactttctgagtttcccgttcgcctcctggttataactttccaaatatccggactgtaccatgctgtgaagcagcggatacaatgttcctacctttaattcgaatacattgtccgatctctttgagagtgtatcgatcatttcatatccgtacatatccttttctgagatcaatttgagaattaacattgcggtatttcctgagaccatatttttgtttactttcatagtgattgctcctttcttatatttgctttcattatatatcggctttcgatagttaagtgtaaaaaaatttgctttcttcttggttttattatatatcgcatatcgatatatgtcaatatgcaagaataaaaagaaccagaaatgcaaacctgcattcccagtccctttaccttcttctttcctacaatagctccgcaaacaatcgcaggaacaactgtcccagccgcagagtcgcgctccggccggacttatacttctccgtcacttccctgcactgttccaatgtctgctccatatcccgccggatatccagcaccgcatcacaatctgccataaaacacccattttcaaaatgatgataaaggctccggtaatccagattaatcgtgccgcaagtcgccatgcaatcatctgccacgctcatcttcgcatgacagaaccccggtgtccactcatagatccttacaccatcctgtaccagattgtgatagaacgatctggtgatactgtagatcagcttcttatccgggattcccggtgtgatgatccgcacatccacgccacgcatggccgccagcgaaagtgcatgtgtcatctcatccgtgatgatcagataaggagttatgaaccagcagtatctgtccgctttgttgacgatactgatatagacatcctctccaacctggattccgtctaacgggcagtccgcatacggctggatatatcccgtctgctttgcctgatacggatgctgtaccagatattttttctgtgcctctatatccagaacatccacatcggccggagtcttcccggatgcttcccacatttccaaaaatgctgccgtaagcgaagccaccgcatctccttccagccggattcccgtatccttccattccccgtatggatgtgtatagttaaaatactcatttgccagattataaccgcctgtgtacccaacctttccgtcaatcaccgtaatctttctgtggtcacggttattcaggaacatattaagtcccggaagcagcggattgaatacccggcaggcaattcctttcgcttccagttttctcgcaaagctcagatttacgaatccgatcgagcccatgtcatcatagaacacccggacctctactccttctttcacccgttcttccagcaccgtctgtatcctgctccatgcatattcatcctcaattgcatgatactccatgaaaatgaattgctccgcctttgcaagatccgtaagctgcgcctccagtcctttgaccgcttcgtcaaaataagtcacatccgtattctgatacaccggataacacgcatttctttctatataattagaaacatttcccgccttcggatccgacacattcagacgttccagcacttccttattttccggcaaaagtggcagaagcttctcatcaatccttttgtaacgcatccgcatcttccgagttccaccgttcataccgatcataaaataaagtgctactccaaggatcggaaatgtcaggattaggatgatccacggtgtcttcatcgaggaagtctcatttcttccatatattttcagaaccagtatgacggcaaatattctggtcagattatctatgaataccgcgtattcattcagtcccttgaatattccaaccaggaacaccacttccaataatatcgaaagcaccgtgaacatcagccgcttcacgccattttgtgtctttttctttccttccagtgtatgactgctcatcttctcactcttttcttctattgtaaattatgattatactaacacgaacgtgtttccggctcaagacttatccgaagttcaatcagaaattattgacctcagttttcccggaaataagcaacaaaaaaatcaccatccccgcagctcgcagtctgcaaaaacagtgatttaatagtgcgcgatcaggggttcgaaccctggacaccctgattaagagtcaggtgctctaccaactgagctaatcgcgcatctttggttgtctgtgttacgttctccgtaacgacaagacttattatataataaggtttttaaaaatgcaagtactttttttactttttttcatatttttttatttttctcatatattgatatgggggttgaatttatgagccatattatccattatgttacaaccaatttcaaaaaaatctttcatactgtctgtacagagattatctcctgcattcaaggcacagctctgcattttgtcctggtcgctgcctttctcggaacactgaatcatttcctgtattttttatccgggcagtctccaatcgttgcacttttctgcccggttaatgaatccgtgtgggaacatttgaaacttttatattttccttttttattcgtaagcatatgggaatatctgtctctgcatccggttgttttaccgttcttttactgtcggtatctgggtgtgcttctcggaatgttttttactgtttctgttttttacacatattccgggattctcggccggaatttcctgatcttagacatcctgcttttttattccagtgtaatattttcatttggaatgtctgaatatatttccggcaagacccgttctcctcacgagacagaacctggctttgtagtctcactctggttgataacatcatttttcttctttgtatttacatgttttccgccagatcttccgttattctattcagcataagtacaacaaccatcaacacatttccctacatatataattaattattcacaccatgatgtgcaacatagctgttaagatccaatgctttgaacacatatccctgtgactgataatattcaataattttcggcagcgcttccacagttgtatcttttgtctcggaatcatgtgacagcaggatgatattattgtcatggaaactggttgcctgatccacaagctgttccgttgttctcacggccccgtctcccgaacttccattccagtcataatattgatatcctcttgcctgaacctcctgcgtaagcgttgtcataattcccttcgtgtaacttgcagatatggtattcgaagatcctcccggaaatctgataaaacacggaacatagccgatctcttcttttacaagctgtccaatctggtcaagatcctgaaaatatgcatcaacagatgcatacacctttgcgtaatcatgagaatatgtatgcattccgatcgtatgtcccttatcataagcctttttgatcatatctttatattccggcatggctcctgtaacaaaaaacgttgctttcgcattgtatttatccaaaatgtccagcaccgcctgcgtattcttagacggtccgtcatccaacgtcagataaacaactttttcatccgattgttctgttgtacccacttttcttcctggttgaactgcaaattcacttctgtcatctgcctgatctttttggccttgattttctttattggatgcatcagtttcattctcattgatcgtaagtttttttgcagttgcttttttctttgatactgcctttttactttccgtctcggccgttgtcatcgttttaccggcattcttttttataacatgcccgccgattcccacacctatgatcactgctgctatgcagactgctgcaatcagaatctttctctgtgcacgatcttttcgtcttctattttttaactttttcctgctcatacttttttcctctttaattttcaactttattctcacttttaagtaattgctttttcttttttactatcataccgcttttttcctttttatcaagccttttcttgagactttttcactacaatgtagtattgtaataaatagattatcacttacaaatgtcgaaaggagtttttaatatgagtgaaaatgaaaataaagtctgtcctgtcagctgcaaaatcgaacatcacgccatgatgttcgcatttctcgccaaacatgcaattgaattatgcggtgaagccggaaaagacgcaatccttgccggaatgactacctatggaaatgagcggggtgcccgcatggcggcaaatgcactcgcacacggtgatgaactgactaccatgaccaatcaggcatacggtgaatggaaaccagattacgccggacaaatggacttcggaacgcttcgcaccgaaccgacacttcagacttacattgcaaaatgtgcatggtgtgaagcatggaaaaagcataacattaccgaatatgggaaatattattgcgtcaatgtagataatgccgtttaccagggtttccgttccgacttcgtctgtacaccgactgccacatctatgagctggggcggcaagcgttgtgaattcgactggggacacccgctctcgcaggaagaggtaaaagaactggctgagaaaaaggccaaacttgggacttcctgtatgaaagattttaatttccacacagcacatttaaaatataccgtcagtcaggctctgatcctgaatcttggtgaaaaaggggaagaggcagttaaacttgcgcttgctgattatgtagatacatttggacaggaatatctggatgtactgaacggtctttatccggttgaatagaatttgctgcttattgatattgttttttacttttcatataagaaagctatgaaatctatttacatcctgtttttctatgctaaaatgatagataaacacccgattctatgaggaggtatctatattttgaataaactaacaaccgaacatacacctgacaatattattgccagctggctcgacgatcatcaggaagaacttgtacatactgccgattacattttccatcacccggaacttgcatatcaggagacactttcttccaaatgcctggcagattatctggaaagccagggatttaaaataacatggaaaacagccggtatcgacacctcatttaccgcagtctggggaagtggaaaaccactccttggattcctggctgagtacgatgctctggcaggtgtcggacacgcctgcggacacaacctgcttggaactgctgttgccgcagcggcctgcgcattaaaagccgatatggaagcaaccgatgctgccggaacgatccgcgtctacggctgcccggccgaagagatcatgtccggcaagatcgtgatgaacgatcagggagtctttgatgacctcgatgttgctattacctggcatccattcgaccgcaaccgtgtcagcaacgatatctggcaggcacaggatattaagaactacacattccacggaatcagttcacatgccgccaaagctcctgaaaagggacgcagtgccctcgacgccgctgaacttatgaatgtaggcgtcaactatctccgtgagcacgtaccgggagatgtccgcatgcattatgcctacattgataacggccttccggcaaatgttgttccggatatcgcgaagacaaattatttcatccgctcctacttacgttcccgcaccgaagatgcaagcgaacgtgtagacaactgcgcaagaggtgccgctcttatgacagacaccaccgtcgatatcgaactggttgcaagctgcagtgagatgaaagttaaccgggtactgacagaattatattacgatgccatgacccaagtcccgacaccgacttatacaccggaagaactggatttcgcaaagcagattacagaagaagccgggctcatcaatgacggaacactattctccggcctagaaccgcttgaagatgagccggttccgatcgctatcggcacagatgcttcacaggtcagccacacgattccgctgatcaccttaagtgccgctacgatgtgtaaaggcaccccgcttcatcactgggctgctgccaaacaggccggtatgactatcggacagaaaggtatgctctatgttgcaagatgtatggcagaaggtacgaaattattgatggaaacaccgggaagtattgagaaagcgtgggagcttcataagctgactccttaaagcttctgttcataaggagacggaggatttttataaattctccgtcccaaacaaaaaaactataacattttatcccccaaggaggttataactatggtcacaaaaaaagcgagatcattcttcttgccgtaaaaccacaaaatgcaccagaagctctgtcacagtgcaaaaaagccctggatggaaaagctttgatgtccatcgtagccggtgtcactgtcgagagactccagaatatgatcgatggcacacctagaattttaagacttcttcctaacacccctgcaatggtattcgaaggtgcatttgcactctgctccggcaacgatctgacagaggacgaattagaagcagcaaaatctatctacagcatgatcggtgtggtagaaatgattccggagcacctcttagatgcagcctgtggcttaagcggcggaggtcctgcttatgtagctatgttcattgaagccatggctgacggcggtgtaaagcagggactcccgcgtgcaacggcataccgccttgcagcacagacctgccttggtactgcaaagatgattctcaaaaaaggaatccacccgggcgagttaaaagacatggttacatcaccgggcggaacaaccatcgaaggctgcgaagctctcgaaaaggctggtatgcgtggtgctgtaattgaatgcatcaatgtaagtacagaaaaatcccgttcattataatcattgtcattctatgtcgattagtgcggcggaattatcagacaaaagaggagttatccacagtttcccgtggataactcctcttttgttggggataactggaattactctgcaaaatttgtcgttaaaataagccgggagattttcagaaatctaccggcctattttacattttttctacattttcatcctctttatcaccttcaaccgtgtaaattcttctctctctttctcctccagtgcattactgatcgtatgcaccagattcgtatacatcggtatcgtaatattcttaagcgcatttgcccgcttctgtgtcttcttgatatttgccgccaggcggtacgccgagttttccacctctgccagcttgatcgtaagctctttcacttcccggaaggcttctcttgcgatatccaccgactcatgcgttatgctgaacgaatacgtcagatcattctgtttcgcatcgtacttaatgtgcggaatctcggttcccatgatactcctggtctgcatcttcagagagtcttcgatcggaacggtaaatgccagctcctgaactttgctgattccatgttcgatattggcacgctgcaggcaggcgtatgcttttgtaaatgtcgcatcgatctcttcctgaatatcttttgcctcatcgatcagtcccatcagttctttcagaagaatattccgcttcttatccatcagatcgtagccctgacgcgcaagcatcagagaattcttcgcaagcatcagatttcccttggtaggaaattctctcggatccatatgcatccctcctactcttctgtcaccagcgtatcccgcgtatccttccagtacttctcaatcagcttcgtatcaatacggtccagttcttccttcggcagaagtccaagcagttcccatccaagatccaaagtctccatcatcgtacggttctccgtcggtccctgcccgatataacgtttttcaaattcttcaccgaacttcagatactgcttgtcaatcggcgacaattcatcctcgccaataacggaagcaaggtttctcgcctctccaaccttcgcataagcggagaataactggtttgcaagatcctgatgatcttctctcgtgtatccttttccgataccgtccttcatcagacgcgaaagcgatggcaggatactgatcggcggatagactgcctgaccgtgaagattacggtccagtacgatctgtccttctgtgatatatccggtaaggtccgggatcggatgtgtgatatcatcattcggcatggtcaggatcggaagctgtgttacggaaccatttgccccgtccacaataccggcacgttcatagatcgttgccagttcactgtataaatatcccggatatccttttcttgacggaatctcgccacgggaagaagacacttcacgcatggcttccgcaaaagaagtcatatccgtcaggataaccaaaatatgcatatttttctcaaatgccagatactctgctaccgtcagtgctaccttcggcgtgatcagacgctccaccaccgggtcattcgccaggttcaagaacatacacacatggtctgccacaccgctttcctcgaatgtcttacggaagaattccgccacatcgtgcttcacacccattgctccgaatacaactgcgaactgttcatccgaattgtcaccaagcgaagcctgcttgacgatctgtgccgcaagctgatcatgcggaagtccgtttcctgagaatatcggaagcttctgcccgcggatcagtgtcgtcagtccgtcaattgccgagattccagtacggatatagtttctcgggtattcccgtctgaccggattcagcggaagtccgtttacatcccgcttctcagcatctgtgatcggtccaaggccatcgattgcttccccgatcccgttaaatgtacggcccagcatttcctctgacacggcaacttccatcggatgtcccgtaagcctcgtgtgggtattatccagcgacatattttccgttccttcaaatacctggatcacggccttatcttcatccaactccacgatacgtcccattttcctcgtatcatgatctacaataaattccacgatctcatcgtaaaatgcattttccacgccttccagtacgacgagagggccattaatgctgctcagtccaagatattctattgccatcttacgtccctccctttacgcatttttctcgatgacgcggttataaaagtcatcaatatccagtttatacagatccagtaactgcagattgtcattcggcacatcatacttaatcgcaatgaccttctcaaatataccttctgccttcagcaccgacatcggcatccccatcgccaccagtttccggctcgtcttatacagatacagaataacatccatcatcttgaactgcttctcaagtgatacacacgtatcatccttatgaaatgcattctgctgcaggaatcccagacgaatcaccttcgcaatctccaggatcagcttctggtcatccggaagcacatccccgccgatcagttttacaatctccatcaggctgctctcctggttcaggatcgccatcagacggttccggtaatcaacgaatttcggcgatacatgatccgaataccaaccgcttaagtcgttcaggtattcactgtaacttgtcagccagtggatcgcagggaaatgtctcgcatacgccagtgatttgtccagtccccagaaacagcgcacgaaacgcttcgtattctgcgtaaccggttcagagaaatctcctccctgcggagataccgctccgatgatagagaccgatcctgtcgcaccatttaacgtctgcatcatgccggctctttcatagaatgccgacagtctcgatgccagatacgccgggaatccttcctccgccggcatctcttccagtcgtcccgaaagctctcgcagtgcctctgcccatctggatgtcgaatccgccatgatcgccacatcataccccatgtcacggtaatattccgccagtgtcagtccggtataaatggacgcctcacgggcagctaccggcatgttcgatgtattggcgatcagcgtcgttctgtccatcaatggattgcccgatttcggatcgaccagctccgaaaactcttccagaacctgtgtcatctcatttccacgctcgccgcatccaatatatataataatatccgcatccgaccattttgcgatctgatgctgggtcatcgtcttacccgttccgaatcctcccgggatcgcagccgttccaccttttgcaatcgggaacatcgtatccagaattcgctgtcctgttaccagcggcacacttgccgggaatctccggttcaccggtctcggtacacggatcggccagtgctgtgtcatcgaaagttctcgtttttctccattgaacagttcaatcgtaaccagcgtctcatcaattgtatattcaccatccggaaccaccgatacaacagtcccttctactcccggcggaaccatgcatttgtgcacgatagcccgcgtctccggcacttccgcaatgatcgttccaccctgtaccatatcgccttcagccactgtgatatgcgtctcccagagtttctgacggtccagtgcgtccacactgacaccacgggtgataaatgccccgcccttgtcagcgatccgctccagcggtctctcaataccgtcaaagatattattcaggatgccgggtgccagcgtaaccgacactgccgctcccgtaccttccacaagttctcccggatgcagtccggaagtctcctcatacacctgtaccgtcgtccggtccttatccagggaaatgacttcgccaaccagcttttcttctcccacatggaccatttccgacatcttaaaatccgtcttccctttcaggtaaatgaccgggccgttgatgccatatatcttttctgtctttccgctactcaccctttacacctccccggaactggaatttctggtattcattctccagtgcacctttgaatgcatagtccaccaggacattcttctcaggcacaaccgcacgcaccccgccgataaaatccactttgctgatcgtcagcgtcattcccgtacgttcttccagatatgtcttcttgtctgcatcagacggattgatatagatcgtcatcgccatccccgatgcaaactgtgctgctttctctatataacggatcagaacttctttatactcttccgttctcatgaacgccagaagctttaactgcacttcttcgaacagttccgtcttaagttctgtctgcgtctttcccatctcacgttttaattcaagctgcgcctttgacattgccatgttcagctgctgtttcgcagtcacactctccgcacgcactctcgtctccgactgccgtctggcttcgatctgatgctgttcgaacacacttcgaagcgcatcctcatgctgctttacgatcgcattcgcctccgctcttgcttcttccatcgccgccgtccggatatgcgtgatcttctcttcgtttgtcaaatgtgccaccttcttcctgtctataatttcaaccctatcgcttcatttacatacgacgtgataaaatctttcttacgtccggtcccgtgtctgtcaggaatctcgatcagaagcggcatcgtccgctccagcttgatctcgtctatcaggtccgggaattctcttccgaatttctccgtcagcagaatcacacctacatccttatcctccatggcattctcgatcgcacaccggagttcttctctttcatgtaccacgattccgtctacccctgcgagacgcattcctgtcagagtatcgatattatcactgatcagatacatcttcatcttacaatttacctaagatcatgaaggagatgatcagtccgtacagacacacaccttctgcaagacctacgaagatcagtgacttaccaagtgcactggaatcttcactaattgcacccagagccgcacttgctgcacttgcaacggcgataccaccgccgacgcaggaaagaccggttgaaagtgctgctgccaggtatccgaatccggttgcgttcgatgccgtattgccggctgcttctgctgcctgtaccggatctcccgcaaagagcatgattcccgcgatcaggacagtactaaagaagaaaaatacattcgtgccgatggctcttttataacgcttcttcgtcctctgtccgatcaggaaatatccgaatggaattacaatgctaagtaacaatgttgcaattaacaataatctaactgtcaggctcatatttttgtcctcctgtaaatatatctctgaattctgtcttattatttttcctctacagaacctgccactggcagcttctttcgaacgcatggcgatttatcctctggatcacaaaatcacttaaatcgtttctttacttttcgtcactctggctgtgaaacggcttgaactcccgtccggttcccttatagaacctgctgaacatctcataatattccagacgcagtacctggataccgacgaccagaccttccagtccgcacaccagcacatttccaagcacgaacacgatccagttcgtgtgtcccgcacttgcgccggataacatcagcacaacctccatcatcgccgcatggctgacggcaaatgcaccgatacgcacataagaaatggtattggagaaatagctcagcatcgtctcgaacagttcgaagaacgcctgcacgaagaacattaccttgccctcttccatcttcttatgctgctttgtcaccagatttcccagcggttccttgaatacgaacaagatcaccggaactcccaggaagatcaccatcaggatattgcccggaaccttatgtcccgtcatgtaaagcacgatcgtcagcaccaggaatccgtagaacaccagtcccgcgattccattatgggaaaataacatattttccacatcatgactcttgatcgaattgatcacgttaaagatcatcaccaggatattcagtcccatgccaaatgcaatggcaaccacaaatactgtgttgagctgtccgataaacggcaggttcgtcatcgcatccaccggccttaaccagtgtgcctgtatcacatcttcgaatccgaagatacttccgaacatgaatccaaagaatgttgagaacagtcccgcaatggatatgatcccagccaggttgatcttcttaatcaggtacaaaagcccgccgaatacaaacaggcataagccctggccgacatccccgaacatcgcaccaaagataaatgtatacgtcagtgccacgaacatcgtcggatccatctcatcatttgccggaagcccgtacatccgtatgaacatctcgaacggcttgaagaaccttggattcttaagcttcgttggcggctctccgaagaatttctccttgtcttcttctacaacaacgaataccttatcatcattcttcgattccgccaggaatttgttcacatcatcttcgcccatccatccgcacaggatgtaatagtcttctttattatctccctcttcgatccttgccgccagcttgcggacatcaaagttcgtagccagttcttccagacgcttcttcgcacctcggagctttgcggcattctttgccatcagctcactgatctgttttttaatcccagcaatctctttctgtttttcttcaatttctttttcaagctcttcacaggcctgcgccggcgttcctatgtattcggatggaattgcaatcctttcaaaatgtaaggaattgaataccgaatccaccttactggaatccgcattcgatacgaaataacatccgtatacataattttcattcctcgtaccttcgataaataccgcattcagatcatcaaataaatatttttccagacgtttgtaataattcacatctacccgtccgaaccggactttcatatatttatactttaatgatttctgcatatccagttccagtgtccggaacggctccatgatcagaagcttttctttgtattcatctacctgtttcttcgttaactctttcttctccagcagatccagatagtcatgattgacatcccggatcaggttcagcatatcctcctgattcatcgatacatcgatcctccggtcttcatccgctaacagtgcgctgaactgttctgccttcgcaagcggctctttgtatggattgacttccacaaaaggctgcaggttgtcggtcgtcttaagctctgccgccgcattctcaagctgcatctcgtatttcgacagatacacctcgcagacacggtcgatatcattcttcggtccgctgatgcttaagaacttcatcttaacaatcattgattcacacctcctaagtatcctaatgtctctcccttcgtcaaaccgtaacggatacactcaagggctgtcgttagtttatagatttcttcttctttcaggaacagatacgtattgacgatcgcgatcgaatacggatcattccttttatcagtcaggtacaacttccgcaggcagtcgcggtacatctgttccagtgttttatccgtctgcatataattatattttcctgcatagtacgtcttttccacttctgcttcaaactgttccagtgtcggcgtctccaccagtgtcttgaattcttctacttttatccgatagtggatcggaatcgtcatcgaatagatatccggcggaagcatatgataatacttcttcgcacggtagatccactgaagattcagaagatcgatcttcattccatagtcctttaagaatatcttctgctcatgtcctttcagaacccgttttccctttttccacatcgtagaaaaataatacagatccaatgccagatcataatcaaacagcgttcccgctccggaatctctgattctggcaagcgcaccataatattccgtatcccgtaagttatctacaagctcgtcgatatttttcgaagttatcaaccggtctatggaaatttgtgaatatctgtcgaaaaactctttcttgtattccagatcaaatggtttctcataatgattgaacacgatcctcaaacagtagttgatcagatcgacttcataccgtttccagtataattttaagaacgtcttctgctccatcccggcaaaccggaagatcctcgaataatcatcgaacaacgactgatacaggatcttctctacatttcccctgtgatataaggaaacatccatccgctccacatatggtgcatacgccgtcttgtctttcagatattcgattgcttctgtcactgtaccaagacctgcgatcgtatcataatctttctctttcagaagcttcgccgacatcgcacgtacctttgtcgtgatcccgctgtaagccatcacatttcccatacgctacacctcgatcatatgtcttacgatttcctctgcataaatgtcatgattttcttcgtattccctcttcagatcatcaatcgccttctggtccttcttccgttcccggtccagaactttctctacttcctgctgcgactttgcttttatcttctccagttttttctgtgtctcttcttccaggtcccggtcaaattgattcctttcttcctgtatctgtttttcaatttcacttttctgctgtctggcatgctctacgatcgcctccgccgtttcttccacttcagccaatttctcaataacagagttcataagccgccctcctttttgcacatttcacaacgaataattgttacttttttatccatgttataataatacacctattttttaaaattaccactatcattttgtatatattgtattatttttctcaattcttctgacaatttccacttccattgactttttcctgcacagacgctaaactaagaacgatttgcaaaatgtcagaaaatccttgcaaatccattgattataaggaggaacacacatatgcgtcttagaaatataccacgtgcagagagcgttctcgaagcctgcaaagaagttgttaagaatccggaaagcttatgcggacactggaatcaggagttccaaaatgaacgaccgctgcacatcgagatcggtatgggaaaaggtcagtttcttctgactctcgcagccgaaaacccacagatcaactacgtcggcatcgaacgctattccagcgtcttattacgtgccgttgagaaattccaggaactggaaaccgaaggaaaagctcctgccaacatccgattcatctgtatggatgcgaatgacctgccgacggtattcgccccggcggaagtatcccgtatctacctgaacttctccgatccatggccaaaggcccgccatgcaagaagaagactgacatccaacgaatttttcaagctttatgacaaagtcctgactgcagacggaaccgtagaattcaagacagacaaccgtccgctcttcgacttttccgtagaagaacttaagacttccgaactgttcgttctggatcagctttcctatgatcttcataatgacagtaagatgaaccagggaaatattatgaccgaatatgaagcaaaattctcttccatgggcaatccgatctgcaaactgatcgcaaaacgcagataaaggaacctcttccctttcctttcatatattaatagagagcatatcttatgctcctgtaatcctgtgaaagggtggaagcttatgttacatctgacgacacaaaactttgaaagcttcagggcctgtcactggcagctttcttccgatgcaccggcgggtgaaagcacggaacatcccgtgtttgccgtagtcatgttctacgccgtctggtgtggaaaatgtgcaatgatgcgtcccattatagaagatctcgaaaaaaaatatcagaaaaaatattccggcagcattcgcttttttgaagtagagaccacagaatccggacttctcgcagctgagtatcagacagatcttcttccgacatttctctttttcaaagaccaggaactgatcgctgtcatgcaggggatgatatcacagaacgattttgacgcacgtctacagaaaatctttagaaatagttaatttatatttcctaggaaaacaaagttttttatgctatatttaagaagtaacagggataaatatatttaataaaaagggggcatggtgaacacaccacgcattatgaaaaatttaaaaagagcattaccagttgccatggcagttgtacttggttctactgcggcaccattggtcgtaaaggcagattcatctaaagttgtaacacttggagccaacctgtcagattcacagaagaattccatgtatgagtactttggtacctcttctgacaaagcagatgtcatcgaagttaccaatgcagatgaaagaaaatatctcgaaggggtcgctccggaagaacagatcggtacccgtacctacagctgttcatatgtagagccgaccacaagcggcggaatccaagtaaaggtttccaacttaacttatgttacaagttctatgatctccagtacacttcttacatccggtgttgagaactgtaacgttatcgctgcttctccgatcgaagtatccggaacaggcgcactgacaggaatcatgatggcttatgagaaagccaccggaacaactctgaacgaagatcagaaggctgccgcaaccgacgaacttgtcacaacaggagatctggcaaatgatatcggacaggacaaagccgaagatgtcatgaatgatgccaaagaaagcgttattgaagacggcttaaaagatgaaaacgatattcaggatgcagtggaagatgctgccaagaataacgatgtcactctgacacaggaacagatcgacaagatcactgaactgttaaagaacatttcccagtatgactatgatgtcaaagcactgaagaatacactgaacaacatcgacggaaagagcgagggattcttctccaacctctggaattccatcaaaggaatcttcggcggcagtgacagctctgatggcggaatcatcaacaatacggatgacagtgcactcggcgatgatgtcgtaagtaacagcacactggattcttccgacaactcttcttcgaacaattccgacagcgcagataattcttccgacagcagttcggatgacaacagcgatgacagcggattctggggcaagatcaagaaattcttcaaggatctgttcggcggaagcgattctaaaaaagacaattcagataagagcaaaaacgatgccaatacagaggacagcaaaggtactgatgatgatcagtctgacgacacacagaatgattctctgaacagtgatgcagattcttcagatgccggcacaacagacaactctgctgatgattcttcactgaataacagtgccgatgatcagtccgatactcagagcagcttaccaggcagcagcgaatcagattcttccaactctgatacgtctgattccacagctaacggctctgccaactagacataagcattagcaggtaattatagtaacaaacgaattataatgacaatacagcaaacctgccactggcagcttttcttgcatactttggtataaaaacaccgggaagctaaaaaaaacttcccggcgttttttattttacttcattcaaattaaaatctctctattccaaaatttaaataatcctaaaattactcctcttaaaattcaaacacagcaactccgtaaggcggcagcttataagcaaatgaatacggtcttccatcacattcttttgcctcagccttatagattttcttccttacctctccggttccgccgtatttttcctcatcactgttcagaatcaacttatactgtttctttctcggaactccgactctgtaatcatctcttgccatcggcgtaaagttgcagacaaacaacagattcttctttgcacctttggaatgtctcatgaaactatagatacttctgtatccatcatccgcattgatccattcaaatccttcccagctctgatccatctcatacatcgccttatgactcttatacagatgaagcaacgcttttacccactctttcatctgctgatgctccggctcagccaacaggaaccagtcaagttctctttcctcgctccattcacgaagctgtgcgaattcctgccccatgaaaagaagcttcttaccggcgtgtcccatcatgaatgcataaccagctttaaggttagcatatttatcaaatcccagtcccggcatcttattaagcatcgaacacttaagatgtaccacttcatcatgcgacaataccaagatataattctcactgtatgcataactcatggcaaatgtcatcagatgatgattatccttacggaaatatggatccagcttcatatattccgtgaaatcatgcatccatcccatattccacttcaggctgaaacctaaaccgccttcttccacatcaccggtaaccttcggccatgctgtagattcttctgcgatcatgagtgctcccggatttcttccaagaacaacagagttcaaatgtttgaagaaatcaatcacttcaaggttcttattctcaccatacttattcgctacccattcgccatctttccgtccataatccagatataacatagacgcaacagcatctacacgaagtccgtctatatggaatttttcaatccagaacaatgcattggagatcaggaaattgcggacttcattttttccaaagtcaaacacttttgttccccagtccggatgttctccaagtcttggatctgcatattcatacgtcgcagttccgtcaaaatcagcaagtccatgtgcatccttcgggaaatgggccggtacccaatccagaatgataccgatcttatttctatgcagataattgatcatccatgcgaaatcttccggtgttccataccgggatgtcggtgcataataaccagtcacctgatatccccaggaaccgtcaaacggatgctccgcgatccccatcagctccacatgtgtataacccatttctttaatatatttggtaattgctctggcaaactctctatatgtatagaaaccttcatcttcccgtcccggatggcgcatccaggaaccaatatgtgcctcatagacagacatcggcttatgcttatgattccaggtctttctgtgggtcatccattctgtatccgtccattttatattctcgatatctgtaactctggatgctgttccaggtcttaattccgcataattggcatatggatctgccttaaatatctgttctcccgaataagtctcaatacaatacttatacatctgatttttcttcacaccaggtataaaacaggtatagattcccagaggttcttctctcttcatcgggttcgcctctgtatcccattcattgaactctccgactaccgaaactgcctgtgcatgcggtgcccataccgcaaaatacacacctttttgttttccgtcctgtaccagatgtgcacccagcttcttataaatctcgtaatgatttccctgtccgaaaaggtattgatccagctcgcctatttcatacggtttcttctttttttcagccataattacccctcgcattctgttgcatatttataacaacattatactttacaaaagggcaaaaagaaagagttttgacagtttagtttgtcaaaactcttccaaaatctgacttaaattttaaaatcttcttctttcagaataattctgtcagaatcatctgttcccttaccaaatactcttcgtgcaaggtgttttacatttgctttctgtgaatgagcaattgcttcatccatgatctctttaacttctgcaacagatactgcatggtcttctctttgcattacatcgatacggctgtacagtgcaaggattcccatctcatccagtttatatccattctctttcgcatatgtctgaccgaatgttaccagctcatcattaatgaataccggaagttccagtttcgaactgaatttcttcttgaattccggattagctgtcatcagacgctccagaggttttctctgatcttccagtacgaaaagtaattcacctgtcttcttttccatcagataattaagttcttttaccgttcttgaattcagcttgccagcatgttcaatgatgattgctcctccacgaagcttctggatgatattcgtaagttctttcttattcaaagactcacctgtaacgatcgctactttaccctgtttcagatttctctgtttctggattgcttttacgatatcaaccgcaagaactgttttaccagatccttttcttccgattaccagaaggtttcctgtcttggaagtaccctctctctgggcacgtctgtcattatcaagaacctctacgatctgttcactcattcctcttaccggaacgaaatatgagaataacttcttctgttcttccgtaagtcctgcctttaatccgatttcactcgttgcactcagatcatatcttcctgttacaacgaatccggtatcaaatggaactccaccttttgactttttaattcttgcctggatctcttcttcggatggctcttcaatctctaattcttctgtgtcatcctcatcttcgatctcttcttcgtcaaaatcttcttcctcaaagtcgccttcgtcaaagtctccttcatcaagatcctcttcctcaaagtcagcttcgtcaaaatcttccccttcaaggtcttcgccaaaatcaagctcttcgtcatcgtcgatctcttcttcgtcgaaatcctcttcgtcaagatcttcttcaaagtcgccttcgtcaaaatcggtttcttcatcatctatgtcttcaaagtcgtcttcgtcatcgtcttcgtcaaaatcggcctcttcaagttcttcctcgtcaagatcttcttcctcaaaatcagcttcgtcaaagtcttcctcgtcgaaatcttcttcctcaaagtcgccttcgtcaaagtcttctccttcaagatcttcttcctcaaagtcgccttcgtcaaagtcttccccttcaagatcctcttcctcaaagtcggcttcgtcaaaatcaccttcctcgaaactgcttccattcatatccagtccgtcaagctcatcttcgattccttctatgaaatcttcatccattcccggaccgtcttcaagttcttcctcataaatctcatcttcggaatcttcattttcactctccatctcttccatcagacggacaatgtcatccggtattctctgtgtatttctttcagattctttctcgtcggctgcctcttcctcagcttttcttgctgcctcttcctcggcctttcttctggcctcttcttcggctgctcttcttgcttcttcttcagcctttcttgctgcctcttcctcggcttttcttctggcttcttcctcagctgcttttcttgctgcttcttcttcagcctttcttctggcctcttcttcggctgcttttcttgctgcctcttcctcggcttttcttctggcttcttcttcagcctttcttctggcctcttcttcggctgcttttcttgctgcctcttcttcagcttttcttctggcctcttcctcagctgcttttcttgctgcctcttcttcagcttttcttctggcctctgcttcagctgcttttctttctacttctttgcgctcttcttcctgacggattcttgcctgttctctttccttctggagacgctcctcatctttggctttctgctttgcaatcgcctcttcatgatctttctgttttgcttcccatttctgaaggatatcatcgatcatcatctgaccgtttgccaggatttcatcctcgcgctctttcattgcttcttcttcaatattaataccgcttgcaacagcaacaccctgtgccagagcttcttctaatgtggcccccgtaactacctgtttgattgctgatgtatgctcttcaggtgtctcaacagatgcttccggttcttcttccctatacatcggagtctcttccactgctgcagttgcttccggtacaacttcctccggtacgacatctgcctgtgcggcttcctccggtatttcaaactcttcctgcatcggaaccggctccggcggaatctcctgtacttgtgcatcatctattctctgcaccgtactttcctgtacctcttcctcagaaccttcatcatattcattctcatcgtcaacttcttccaatgttgactccgtctgttttacaggttccggctgcttctttactgctcccggacggctgtcatatttttcctgctgaagcggcgtcagtggcttatacttcatcttaagttccatcgccaggtatacatactttccttcgctgaaccaaagaatcaggtcatcacattcttccagacattccgcagtcattcccgcctcatcatataacttggcaagttcatatgcccatttttcaatatattccgcttttttaaattcttccaacgccgcaatctgatccgaaagtgctgctccctgagttctcaggatcttatacttcaggatatattgattcgggtcttttggcgccagcttaacaaactcttcataacagtctgtcgcttctctgatatccttaatctttaatgccaatgtacctaatcgatatacgattttacggcttcccggtgctctgtcaaatgccaggaataagatatctctccctttcttaaattctccgttatattcataaatctcacttaccgtattaagcatagaagcgttctttactcttcgccagtctatactttcagcaatatccattgctttctggtattcctttttttccagatgatcaagcatctgctcggtctttaccctatattcatatttatccaatatttctcacctcaaatatttattttaaaaaagcgtatttccctacaattttacttatataagtttatcatatgacctgtctattgtcaaaatatccggttaaatatgttaaaaaaatattacaaaagttacaaaagtttataatttattgtcggcagcttcttccgaatgcatggcaatgccgaaaacctgccactggcagctccttacgaacgcatggcgataaaaaaacagccatcataattctttttattatgatggctgttacatattcaattttatcatatacttttcatttgtttcggagaattaattattattttattccctgacacctttttatgtatttcaatgatcttttactcattgtcctacatgttcattcaaatctactattcatgtttctttacacattttaataatatatttaaatatatggtattatgttcaatatgtttacagtttttttatttttattatccggttttattttctccgtttatttttattattacctgaatctcctctaccggcctttttatctattattataaaggcttactctatgggaatttttaactgtcataccactaacatattgattcgatgattctactgtgtccattggattaagcctccttttcataaatttccaatcaacatatctcaccgacatatgaaatattttttatccttataaacttttttcattctttatacacataagatataaatgatatttattaccttgtctctttcattaagattattcctatatccccgtgatatcattttataatcttacctcatccattctctatctttacaatatactttacgatatctaatattcgatgcattaccaaatactttatacctatatatgcattttagatttctaaatgaatcggaactctgataataaaaattctcttataaaatatatgctatagaattttcaagattccctttctcgtcaggagtcctttttgtttatttcggatttcctttggattgattacataatatcatccgcattttgttttgtcaatactttttgcaattattttcttttatttttcattattttattttttacattaaattgtctgatttttatatatttattttaatgtttgcacaatactatacagtttctctgtaaccatatttgtcaacatatcacattttcaattgttaaccgcgtcaaatatgtagttgacattttgcacatttcattttatactgcttttatattttgatatgaatctaaaggaaaggagttctgccagccggcagacaattactactatgaataacacagcaaacagcacaacaacgaaaaggctctccacccgtaaactggttctgatcgccctgatgactgcgatcacctgtatcttcgctcctatggcgattccgatccctgtcagtccggtaccgatcagtcttaccaacctggtgatcatgatcagtatctatgtacttggatttaaagatgcaacgatcagctatatcgtatatctgttacttggccttgtcggtcttcctgtattctctggtttcaccggcggattaggtaagcttgcaggtcctaccggcggatatctgattggttttatcttcctcgcactgatcgcaggactgttcgttgacaaatttccaaagaacagaatcctggccgttgtcggtatgctcatcggtatggcgatcacttatatcttcggtacagagtggcttgcaattcagttaaaaatgtcctttgttgcagcactttctgtcggagttatcccttatcttgccggtgacgcagtgaagattatcattgcgatcattgtcggacctgtgcttcgcagccgtctgagtcatatgcagtaacagttacatctacagaacttgccactggcagcttctcttgcatactttggtatctaaaaaacacacaataccgattatatgattccttctgtttcggtattgtgtgttttattttcccttctggaacctcgactataaaacttccggttttacaatataatatctcccgttttcttgccggtatccatatcataagcctcgataatatttccactgatcacgtataatgtatcttctatataaatcccccggataccttgcgaagtatttccactaatctcttctttcaggattgtttcaaactttttctcttttccattataagtcagcaggcagtacgtttccccattctggctgtagccggagaacccgatcctatttttctgctgatcggccagaacggatttgtaatcgtatgctgcatttgttccatacagatcatccaatacaagggttgattcttcttttacatccgctctgtctgtaatatcgaacatggtgatttttacaccttccgacacccctgattcttcatcggttgacatgccgattccaagtaatttatcttctccatagaaatgcagatattctgaaaatcccgggatttttaatttgccgaggatctttggtttctccggattggacagatccacgctgaacaacgggtctacctgctcatatgtcacgaaatatcctgcctctttcatgaatcttgcagaatagatggattccccttttgccagattctcgatagaactgatcttatccaatttcttatctaagattgttaccagattttcatcatcattggttgtaaataatcttaagttccctttatattcatccagtgaaaatgtatcattcagatatccttttacttttccctgagctacggcctttagcttgccctttctataagaaatcttgcgaagtgtcgtcacagtctgattatcctgctgccattccgattcataatagtagatattttttccacttacatacatttgaccgccttcggagagaattgccttattatctactgttttatccggtttgctgatgtccacggaactgatcacttcatacattgttccacaattcaccggcggcagacagatactggcctggctcatctctttgccattcaccagaggcacataggtgaccggtttatctttgaccacgtcgccacctgtatagtattcactgaacagatacagatatccgtctgccatacgagacgaattgtaagtaccactctgtgttacctcgccttcttttaccggctttttaatatcacggatgtcataagtgaccgccgctgttttagtctgattccaggtatctgtgttcgtctgctttttgttacttttatctgcacattctttctgacatacagccaccagtttcttttgatctgtatttacataaaactcctgtattgtgtattcttttccaagcgtaatctcgctgtatttttctatattcgttccgctgtttcctacgtctacaatatcgatggtccggccattatcttcccgcacatatagataagtcccgtctgttttggcaatatccccttcatctacaccggactgtcgtacattggtctgtgaataaccgccatctgctgttgccacaccggtatctgccgaggccgtttccgttgaagacgccgttgatcttcctgttgaagccgaatcctctacggctgctgtttcatttacacttcttgcatacattgcaatgccggagttatcttgtgaacgtttaatatatttatagatttcgtcataactttgggctgtcctgatcttcttactgtcgctgatcttctttactgtattactatttcctgcactgctgcctgcattgccatctgacacatccggagaatttatcgctccttcatgcatccttccatactgccacactacagttcccgccacaactgccacgcaggccgccgctacaagcccgatttgatacggacggaaatgtttcttctgttttttcttttccaataatttatctatattctccgatctcagactatccgggacttctgtatcttctgacattcttgaaatctgatctaggatgtcctgttcacaatattctttatgttcattctcgcgcttcataccttctcactcccttctttccttctcatcttcgccgtaactgcccagcacacattccatcttcttaagtgcccggctccgcttcgaccgtaccgtgttcggattcagcctcatcatctcaccgatctcctgactgcaatacccgccaaatacggataatccgactaatatctgttcctcttccgacagcacaaagaatgctttcttaacatcgattgcaagatcataatccggtgctgtcgcttgttccggaagttcttcttctcttcccggtgtttcttttaacgctttcttcaatctcttcttacatttattcgtaagaattgtaaatatccagcttttgaatgcttcttctttttttaatttatgtatgttctcgtatgctgcgataaccgcctcactcaccgcatcttcggcttcctgcggattcttcatcaggcacagtgcgtaacggtacagatcacggtagacagtctcgtacatttccgagaatttctttatactgcatttcatatcgtgtcctccctcagatatgagttttcatggtttttctttcttttctctatcatctacatatataagagtcttttactccagattctgttgcactaaattgaaagtttttctatcttacattcatgttcctttgagtccttccaataaccgattccaattgccagaatgtcacccgtgtatatttcgtcatcacccagttttccctgaaaacgtaacgcataacccttttctttgatctgacgcactgctgattctgccgtatcatcaacctttagatctcatcatatggaccagaatttgtccaataatttcccattcggattcaccgtatccacaagatacttctcatatagcccgtctacttcctcttctataaatccaaatattttttccagcatcaatgtcttatcaataaaatatcgtgacttcgtctccccttcgtacaaaacatatggtgctctactgttaagataaaatctcatctttgtgtctctttccggtaacactgcttttttccatcgttctcttttgttttcttccatccattatcctccacttgcaattcaggaggatctatactttttcagaaatcctcccgctcattttaatatgttgtgaatcttaagcattgaaaatctctgatatgtatttcgcttgaatatagaaacagtttttctgctttagaaaatatagaaatataatgcttggatatattctagcataaggcactcaggttgtatatagtaaatttaattttatttttcatctacctattttattatgacgtcaaaaaactcctcaaaatcccgacaaatctttcatgtctcagaattctgaagagtttttatttgtttatattggagagaaaaaaggttattaaaataattctaatttatttgttcacttttttataaagttcgatcatttcttctgccaaaaccttgaatacttccgtactcatcatctggtcttctgcatgtgcaaggatgagactcatcttcgcgtcttcaccggccgcttctttctgcaccagatctgtacatcgtcctgtcccaggaacattccgacttctacgattggtacaggaatctccttggtaatcggcactgtcgtaaatacataatggacttttgaaaaatcaaaactttccaggctgtctatcagacctcccggagtgtttctatctgtcttattttctgtctttcttattctctatctaccttattctctatcctctataataattgatcaggcatccttttaagataatctctctctccgcatccgtcatatcaccgagcttcagagtgatctctttcaaagtatctccaaccacatacgccttaatttcagcactcttatcctcgattgcttttctgatctccggcacgaagatataatcaccgttcttgaagcttaagttctcatgatcttcctctgtaataaatggaagcataccccagttgatcaggttcgaacggtatctcttggttgcgtattcgttcgcaatatttgcccagccgccgagtaccttctggcaggatgctgcctgttctcttgcggaaccgtctcccggttttactgcgaagatcgtgcttccgattccaaggttgccttctcctgcttccggatacgtcttgcgtacttttgccataactggtttcagttcgtctaatacttctaacggacactgtcctgcctcgattgctttctcggctttctgcacttcttttgcacggcctacataagcagggtcttttctggataatgcaaattctgcaagtcccagaggatttgatctataagaagatgtctctcctgacggaatcaattcgtctgttgttgtaaccggatcgtggatctcggatactactttcaggagtaagttctccggaagtgctgccattgccggccagtctttgatgttcggtccgaatttgatctctacagatggatctgctacgccgtgactgtcgaagacacggtttgcgtaaatatttttgtcaaagtgatatttctgtcctttgtattccacatccatgtcagttgcaggtgtaaggaatcccttatttgctgctgttgctgcgatggaacgtgcatccataagtgcaacggatgcgatctgtccgctctgaagcttagagccttcacggttcgggaagtttctggttgagtgacggatggagaacgcattattggcaggtgtatctccggcaccgaagcaaggtccgcagaatgctgtcttcacgatcgttcctgcttccataaggtcagcaactgcaccgttctttacaagttccatgtaaatcggtgtacttgccggatatacgctgaatgtaaattcatcagaaccaatgtaatgtcctttgataatgtctgctgcagcacagatattttcaaatccaccaccggcacatcctgcgatgattccctgatccacatataactgtccgttcacaatcttatcctgcagagaataattaactgctccgtccaggcttacgagagctttctgctctacatcgtgaaggatgtcttttaagttcgttcttacttcgtcaatcgtgtacacattagacggatggaacggcattgcgatcattggcttgatctcgcttaagttcacatataccataccgtcatagtaagcaacagctccaggattcagctctttataatcttcgcttcttccgtgaatgtcgtaaaattctttgatcttgtcgtcggtcttccagatagatgacagacaggtggtctcggttgtcataacatcgataccgatacggaagtcagcgcttaatttgcttacaccaggtcctacgaattccattactttattgttaacatagccatttccaaatgttgcaccgatgatcgcaagtgctacgtcctgtggtccgacacctttcattggttcgccgtctaagtagattccgactatgcccggcatcttgatatcataagtcttattcagaagctgttttacaagctccggtccgccttctcccatagctatggttccgagtgctccgtaacgggtgtggctgtctgatcctaagatcatcttgccgccgccggctaacatctcacgagcaaattgatggatgactgcctgatgaggcggtacatagactccaccgtatttcttcgcgcaggtaagaccaaacatgtggtcatcttcgttgatggttcctccaaccgcacaaagtgagttatgacagttcgtaagtacataaggaatcgggaatttttcaagtccggatgctctggccgtctgaataattccgacaaatgtaatgtcatgggacgtcagcttatcgaacttgatctgcagacgatccatatttcctgaggtattatgcgctgccagaatgttatatgccatcgtattctttgcagcttcctgtggagtcacatctttacctgtctttgcagcaactgcttctttttcttccacaatctctgttccattcagtaaatagactcccttgtcatataatttcagcatgttttgtcctcctactatcgtgttataaatatattgaaatgtctgaattcagacactttctaacaaaattactgtttcatatatttcatatgatccgctaccatcatagcaatcttgaatgtcagtgcatcatcaaatacacgaacatccagtccagtcttcttctgaatcttctccagacggtacaccagtgtatttctatgcacatacaggcgccttgccgtctctgatatattcagattattatcaaaaaatgtatatacagtcgtcagttcttcttcttcgaaaatgtctgctttgccatcttcgaacacttcattcaggaacatctcacagagtgatgccggaagctgatggatcagacgcccgatcccaagttcattgtatgcaagaattttcttctctacatagaatactcttccaacctccagtgccatatctgcttccttatatgatctggatacatcctttaactcctctacaattgttccatatgctgctcttacacttaccatagcttccatgttcagtgttgtgaccagctctttggcgatctgttctacctgtggatagtcatcggtcgactgcaatgattttaccagaatgatatgtttttcatcaattgcggttacgaaatccttcgttcccgtcgcatacagacctttcagtgtttcctgtaccagaatgtctccttcattcttcggttcgattacaaatacaaccctcttaatttctgccggaatcttcatcttctttgcctgattatagatatcgaccagaagcaggttatccagaagcagattctgaatgaaccggttcttatccatccgttctttgtatgcataaagaagattcctaagctggcttgctcccatgcgccccgccagttccataccatctgcatttcccttcagcatcagtatataagtcggatcactgtcctcatagatgcggaacattcccatctcatccaggatcatctcatccggctcttcttcatcatcacggaaatcctgaatctgaagctcatactctgtcagattctcattcgtccttacaagacaaagtccctgcatatcccatattgcacagtcaaatccggtgatctccctgatatcctgcgctgttttgtgtaatatctgatttgataacactcattgtcctccatttcctgtccgcaatactgttctttgtgtcctcttgcatacttgtatacattttaacacgctaacgaactgcattacgaatacattataacagataataacgctttaacaaagtaaaattttattgtctgcataaaaaatgcaaaagaccggacgctgtctcacgcccggcccctcttatattcatctgttccccacgattaccgcggtctttattcctatctgtaattacagactagttagtgattgtaacctgtgtctctttatcaaatacgtgaatcttctcagcatccagagcaaatttcacatggtcacctgttcttgctgttgttctaggatcaactcttgctgtcatgcttgatccttcatagtcaaagtataagaatacttctgcaccaagcatctcatatacacggatcttagcttcgatcactgtattaggagaagtttcgatgaacatctgctcatcatgtacatcttccggacggattccaagaacaactgtctttcctgcatatccaccttcgatcagcttcttagcttttgccggtggaagttcgatctctgaaggtcctgctactaagtatactttatctccgacaactttacatgtagcgtcaacaaagttcatctgtggtgatccgatgaatccggctacgaactggttgcatggatgatcgtacagagtctgtggtgtatctacctgctgaacgatacccgcgttcataactacgattctggttcccagtgtcatagcttctgtctggtcatgtgttacgtagatgatagttgtacctaatctctgatgtaatttagagatctcgatacgcatctgtccacgaagttttgcatccaggtttgaaagaggctcgtccataaggaataccttaggattacgaacgatcgcacgtcccattgcaacacgctgtctctgtccacctgaaagagcctttggtttacggtcaagcagtggttccagatcaaggatcttagctgcttcacgaaccattttgtcaatctggtcttttggtacttttcttaatttcagaccaaatgccatgttatcgtatactgtcatatgtgggtacagagcatagttctggaataccattgcgatatctctgtcttttggctctacgtcatttaccactctgtctccgatctttaattctccggaagtgatatcttccagaccggcgatcatacgaagtgttgtagatttaccacatcctgaaggtcctacgaagatgatgaattctttatcttcaatctcaaggttgaagtctttcactgcttcaaatccatttggatatgttttgttaatgtgtttcaatgataaacttgccattgctataattcctcctgatttataatcatttttattccagtcgttatctgtttcgttctgataaaagtatataaaaaaagttcaacccgggtaatgcccaagttgaacaatctttttctcattttctatacaagttgacgaacagcctataaaagtgcctggtaaatatctctttttcctacacctctgtcttttgccacctgtttcatcgcagattttttgtccattccctgtccgagataaagttccatatgttcttcgatactcatctcttcccatctggctttttcctcattgcggatctcttctctgctctttccttcgatcaccatgacacattcacccttcggctcctgtacatcataatatgccagcgcatcttcgatcgttgtggcaaatacggtctcgtgcttcttcgtaagttctctgcagatgctgatacgtctgttaccgagagtctcctgaagcgtcttcaatgtacggaccagtctgtgcggtgcttcatagatgaccatagttctcgtctcatctttcagttcctccagaacggcctgtctttctttcttatccgttggaagaaatgcctcaaatgcgaaccttctcgttccaagtccggatatcgtaagcgccgtgacacatgcacaggctcccggaacagctgtaaccgtgatccctgcttcctgacacatcttcaccagttcttcgcccggatcagagattcctggcatcccggcatccgtgatcactgcaatgttctcaccgccttgcagacgttctacaagtttgtgtcctttttctatcttattatattcatgatagctggtcatcggtgtcttaatctcaaaatgattcagaagcttgatactgtttctggtatcttctgctgcgatcagatccacttcttttaatatcctcaccgcccggaatgtcatatcttccagattccctatcggtgttgcacataagtacaatgttcctgccatctcatactcctccatcttatgtttggtgcctgctctgtatctatctgcccggtccatctgctgccatggcttttgcgccgtgatattttccttacttacgacggactcattccgtagagtgcaagcagttcctccgtataacttccatctttctgatatacaaccaacggcggttctacctgcatcctcggattgccgcccttcattccctcgatcagaaccatattcggttctttatctatatacggatataccagccgcatacgcttcggctcaattccatacgcacacatctttgtcatgatctccggaagcctgaacggtctgtggaccatatagaatcttcctttgactttcagtatcttcgcactctctcttaagatatcatccagtgtacaaagtgcctcatgtcttgcaatatacaatgcttcattctgattcttcagtccgtggtctccgatcatatacgggggattggttgtaataaccccaaaagaggcggctccgaatatggatgctgcctccttgatatctcccgttacaatgtcgatccgttcttccagcccgttataactgacactgcgccttgccatatctgcactctcttcctggatctccagtcccgtataatgcagtcccggatattttgcctccagaagtatcggaagaattcctgttcccgttccgagatccagtgctttttcattcttctttactctggcaaatgctgacaaaagcactgcatccattccaaaacagaaacggcccggactttgaatgatctcatatcctttgatctgcagatcatccagtctttcattcggaagtaatttagttatcatctaattttgacgctccgttcttttcttctaacgccttcagttccttcatctcttctttcgaaagtcttacgtctttcttcttacgtcttggtttgaacttcagttctgctgccggatattcacggatctctttctcgtcattatccagcgtcacaacaaccttaaccagctggcggagcacgttaactgactgtacatctcctcttaatccttccggtgtcgtcacatgatctccgttcgccggaagatggctgttcagttcttcatatgtctcttcttcattcgtcagacagcacatcagtcttccgcaaactccggatatctttgtcgggttcagtgaaagattctgttctttcgccatcttgatcgataccggtgcgaactcagataaatacgtgtggcagcaaagtggtcttccacagataccgatcccgccgcggatcttcgtctcatcacgcactccgatctgtcttaactcgattctggtacggaacacactcgccagatcctttacaagctcacggaaatcaattcgtccgtctgccgtaaagtaaaacagcactttattattatcaaatgtatattccgcatcgatcagtttcatctcaaggctgtgtttgtggatcttgtctaaacaaatcttgaatgcttctttttctttttctttattcttctcttcttttttcttatcgtcctctgtcgcaagacggatcacggatttgagtggctgtgtgatcttgtcatcttccacttctttcggtccggttactacagaaccaaattccacacctcttgcagtctcaacgattaccttatcaccggtcttgatctcaagttttcccggtgaaaagaaatatattttcccggcagttctgaatctaacgcctattaccttcgtcatatgattagttctcctttatggtcaggaacaaaagctccataaccagatcgaagttaacattcgctttcagtctggctttcgctttctcaaggctctccaggatcagttcgattccttcataagagctctttctcgcctgttcttttatactctgtaactggtctttgaatacgaccttgtcaatctcttttgttgctttatataataagacatccctgtaccagatcatgataatgtccaggtagtctgtgatctctaatttatatacggatatattcttaaccgcagcaacgatttcatttaattccatctcactgatatgcttcagaagctgtaccgcttcttctctgatctcgttaaaatgatcggaattggccagcatgatcgcacgtcccatattaccctgtgcaaatgccgtgcacatatctgctttataatccgggatctccagattctccatcagatactttttgatcagtgtatctttgatattacgcagctttaacattacacatctggaattgatcgtcggaagtaatgtctccgcattctccgtcagcagcaagaaaactgcatatgacggcggttcctcgatcgtcttcaggatcgcattctgtgcctgcggtgtcatcatatctgcctgtgggataatgtagactttgtacggtccctgatatggtttgatatccacagtgttattcacctgtgtacggatatcatctacgctgatgctgttcggcttttcatgtgtcacacggataatgtccggatgattgccactctctgcctgcttgcaggaatgacattttccacacggttcattgtccccggtctcacacaaaagcgtcatggcgaacagattcgccagcatcttcttaccggaacctctctccccgttcagaatatatgcatgagagaccctgttattctctactgcactgctgatatattttaatatgtctttgtgtccaaccacatctttaaagcttcccatctcgtattacctctactatttcttctttgcatcgtactttatcatcattctgatatcttcttgtaattcctgctttcttcagattatcctccgaaaaatctttctgatcagccagaaatcttctgcagacttcttcatagcccggatgatcctgctgctgttctcgcacgatcgcgcgcatcaggcgttctttgtcctccacttcgatataaagcgggatcaggttctcatttccatagtactcttttgtctttatataagactccagtgtaccgatcatgagataatcattttcatccagattaatctgtccatcatctattgtagcatatttccagtccccatacacggtttgataggtgcgaagttcaattattttaccctcttcacggtatttttcaagtatttcatccgttacgaagtaatattccactccatctttctcgccttcacgcatcggtctggtcgtatataaagttaaagtcttaagttccggaagatcctttctgatatctttgtaaatcgtatcctttcccgaagagcttttacccatcatgtagtatatcttacccatctatccacacctctatgccatcttccgattgaagtccctcaatcgaaaaatcatgttcctgataccagtgaagtatctctaccgcttcttttgtaatacgctcacccggtacgatcagcgggcttcccggcggatagaggtatgcgtattccacagaaatgcatccgatactgtcttcaaagcttcgtttttgtatcttatccctgcggttcaccgcctctgcgatcgtccacactttttcaagtgccggctgtctgccggaaagtgggaggtcagtttcaatagcagccggccggccctgcctggtatctatctctttatcaatctctagcagcgcatctctcaaccggtccagaccttcctgcgtatctcccacagttgtcatagccagaacataggtccctgccagcatttccatctgcaaatgatatctatgaagtaatatctcatacagctcgtgactggacatcggtgcgtgttttacggagatcacgaatttggatctgtcatagcggtctgtattatcagtctggataattttcagatacttaagccgtttcagatctttgcgaagtgcttcaatgcgattggcatactcagaaaaaatatttttatatttataatctgatcttgcatccgaatgcgtttcaagtgtctcttccagcattccgatacacgcatcgatactcgccatcaatatgtacgacggactgctcgtctgcagcatatccagatactgtttcacttttcttcggttcaccatgttcccgttcacatgcagaagcgccgtctgtgtcagcgccggaagcgtcttatgaagactgttgatcaccagatccgcaccatatatattcgcactctttgggaaatacggatcaaatccgaaatgcgcaccgtgtgcttcatccacgatcagcggacacccttttgcatgcacaatctctgcaatcttttcgatgtccgacaccacaccatcatatgtcggtgacacgatcatcaccgcgcagatcttcggatgttcttccagtgctttctgtacatccgcaacatcaatctctgtgctcagtccctgttccgtatcgaatttcggatagagatagaccggatccaattcattcagatatatcgcatgatacacagacttgtggcaatttcttgccacaagtatggaatctcctttttcagttgttcctaatattgcacttatgattccaaccgtacttccattcaccagaaaatgtgtctcgtccgcatggtaaactcttgctgctctttcctgcgcatctcttagaattccctctgcatgatgcagatcatcaaagccatcaatctctgtaatatcgatccggtacggagatgtcccgtccatcagatccagatttctcttgtgccccggcatatggaatgcatagtagtcagaatcgctgtaaacctttaatttatcaaatatattattcatgcgtatattttagcaaaataacattatattatcaagccataaactcccgcaggatctggcggatcatctcatcctttggaagctcacgtatggtgtcttctttcggtatttcttcctgtacatcttcctgtgcagactccttatcggcatttcctttaatctccattgcctgcgcattaccggccaaagtcccggtactttgtacctcttcttgcaatatatcttctgtccttttactcccgtccgtaccggcaagccgcgccgatgcttttgccaggttcctggcgttctcctttactctttcttttctgcggctctcacgctgcatctgcacaacaccggagccggataccggaacagattcttctttttcttcttgctccgttttgtcctctttttctgccttttcttcttttgtatcatttgtctcgtcttttttgatcgcattgtctcttcgtccggtgcgttctttctgatttgccttttcatacttgtggagacatacattttccagataatctaccatatagttctttgccatctgcatgcaataattctcatccgttgtcagatggaacagccataccaggattccaagtcctgcgccacatgcacccatccgcaggacagcatctcccatgccatatacctgataactcagtcccgcaccgacaagtccggttacgataagcagtcccgcacatatcttctccagtctgcgcagcgtgtgaagtcgtaatccacagactttatactcatacagatacttatccacaaatacccctacgttttccaccgtatcgctgatcatacatgcgtgttcgaatttcgcacggactaggcgcatcagcgggtggttactcttactcatacttcccgccgcctccaccatacgtttcatcgtcatactcacgatacatttgtccaccacaccaaggccggtcaggatccccatgagtacgaacagtaacttcttgtccaataacatttccagcataataaaagccctccttttgatttgcattatactgtaaatcaaacaggagggcgcttaatttcgttcctcatatttcgcacggaaaaccacatatcatgtcagttccgggcacattctgtgatattttaaattgtatgccttttcacttatacctagatcatcggcagtaattccttcataagtcttacactgtgggcaattgccttcttttcaaacgttggataatccatagtcgcgctgttgtcagctttatccgaaattgcacgaatgatgacatacgaaactttgttcaggtaagctgcctgggcaattcccgcaccttccatctctacacacatcggatggaataatgatgagattctttccttcacatctttatccgaaataaactgatcgccgcttaccactcttccggtaaatgtgtgaatatccggattggctttctcatttgctgctactgccttcttgaccagtttttcatctgccgggaatgacagtgtgtccattcttgggatctgtcctgccggatctccgaatatcgtcgcatccatatcgtgatgcagtgcatctgtcgagatcaccatatctccgatatcgatctgtgcatccagtgaacccgcaataccggtattaatcaatgtatccacaccaaatctgtccaccaggatctgtgcacagattcctgcattcaccttaccgataccacttcttacaataacaacagctttgccgcccaatgaacctttgcagaataccatccctgcctgttctatagtctcatcaatctgcatatcttttttaagttctgccacttcttcttccattgctccgataatacctatcatagctctatatcctcctgttattacgatattttctatattaattcgtctatgccctattatatcttatagaaaattcgatttcaaccggcgaaataagtagtaaacagacagaatctctgttataatctgagacgtatgacaataaaacaattatttacaaaagcaacaggaggtaatagatatggattacaaaccatcaggagtctgttctcgactgatccatgtagaacttgacggagataaaatcgcaaatgtagaattcgtaggcggatgtgccggaaatacagccggaatcagcagccttgtaaaaggaatggacgctcacgaagtgatcaaacgtctggaaggaacaaaatgtggtgcaagaccaacatcctgccctgaccagttatccaaagctttaaaacaggctcttggagaataattttctgcgaatttcataactacagaaaaaaaggctacttgtcctccccttatcggggaagacttgtagccttttatggggataccttcttttttatgtactcatactgcaagatttcgatctttattcagtgtttcgtttacttattacaattgttacttttttaattgtttttcgttcactagtattgatgcattacttatcttttatttgttttatggatatttgtctttattagtttatggtttttttgttatacattataattacatatttttacgtctttgccttgttataaactaccttatttttcaatccctgccaactacatcttttgccactgctttataatcttctgcttgcatcggaccttcggtcctttaattacctcgagttattccgtcctattgttctactttgaatattcatcttcgttttttaaaacttcactgttttttttgcttcttgtgttatgtttttgcttctatgctcttttgaggatattaatcgatataaataccaccagtaaatgaactgctcatgtcgctgttagctgcatgtgtgcatcgaacacggtaataatagccaccttctacgtaaagagtcctgttggaagttactctgttcatattcaggttttctttctgccacccatcgtagtaagaccattctgtatcatcttctttggcgcgttctacaagcacacctacttgtacgctgtcaactacatgtgctgcgattgtcgttccaccagcataaatttttccttctccaagtttcgtacacttagagtatccggccattaagtcaacacctctggtaatcttggtatcataaccaattgattcattttcgtgcgttaattccgaaccatctattactttattttccgcagccttcacttccagcatcgatgtaagcgataatcctccgaccagcattactgccagacacatagacactaatctcctcttcatatttcacctccattcgtacttattttttcgccctcatatattaatacacataactttcaaaaaactgtcgcatttattttggaaaaaataaattttttaatattttttcaaaattttgttcactcattgttcccatcagtatatattctatattcccatatttaaatttagcaacgcatttagggacattgctatcttctatttcatatagtgttatgtttatcttacatttatgaatttcttttgaatatttcttttctattggatcttcaaaatctattcccaaagaactatctctgtatggcatattaattatatatcctattgtttcaccatcataactataatacatctccgccacctgcttactctcatccagattcattgtatcgaatttcatatccggtaagcagacaaatattttaaccacatctgtatcgaaagtatctcttatttcctgataagctttttcctcatcttcattttctatcgtcttaactttctttccttttacggtatattctacatctctatctccaacagcctgtctcaccatccgtacaactctttccggtcctcccatgctggtgattcccattgccagtacgcatacgataacagcggccagtgccagatatatcttcagaggttttctgcgataatgaactttcttttctgatgtatctgccgttccaacttcggccttcagcatctttcttccgagttccagtgctctgcggtcttcttcagacaggttattgatggcttcttctctttctctggcttcattttccgcctgttcgcgctgatattctctcatctgttcttttaatcttgcaaggacagcctccttcgttccctcaggcacaacaagactcgtatccttttcaagggactcttcttcctcttttgcaatctcctcaaattctctggcaatgcattctttcaattcatctttctcattattcattttgctaccctcaaatttttgactggtcttcaaatttctccatagttttgccacttgacctatttctttcagaaagtataatataggtataatctttattatattattgattcgaaaataatacatattcaagtctggaggtaattatgaaacgtattatcttaaccggtggcggcactgccgggcatgttacacctaacatcgctcttctgccacgcctgaaagaattaaactatgatattcactatataggttcttacaacggaattgaaaaagaactgattgaacagttcggtatcccgtatcatggaatctcaaccggtaaacttcgtcgctacttcagcgttcagaactttacagatccattccgtgtaatcaaaggactcggcgaagcgaaaaaacttgtaaagattcttcatcctgatgtaatcttttccaaaggtggcttcgtatccgttcctgttgttcttgccggtaaaagccgtcatgttccgaccattatccatgagtcagacatgacaccgggacttgccaataagatttctatgccatcggcatcaaaaatctgctgtaatttcccggaaaccatcgagcatcttcctgctggaaaggctgttctgacaggctctcctattcgtcaggaactgttatccggtgataaatataaagctttagaatttttgcacttcacacaggacaaaccggtaatcatggtagtcggtggaagtcttggttcagttgccgtcaacgatgcagtccgcagtgtccttcctgaactgcttcagtccttccaggttgttcatctctgtggtaagggcaaagttgatgaatctctgaaaggccttcagggttatgcacagttcgaatatatcaaagacgaattaaaagacctctttgctctgacagatctcgttatctccagagccggagccaatgcaatctgcgaacttcttgcactgcacaaaccgaatcttctgattccactatctgcaaatgcaagccgcggagaccagatcttaaatgcccgttcttttgagcgccagggctacagtgtcgttcttgaagaggaagaacttaatcatgatgttcttcttgatgcgatcatgaacctgtatcagaatcgtgaaacatatattcaggccatgaagaattctcctcagcagaattctatcgacaccatcattgatctgatcgaggctgctgccagacactaatccggaagcattctcattcattgatcttatatgcagagaacctgccactggtagtttctcttgcatactttggtataaaaaacaggtggctgtacatcccacctgttttttatatatcgtgtaagcggtcatactgatctttatacctttttatcatccattttcttgctctctttagtatgccttctaatgcatttaatgtaatgcccattctctttgcgacttctttctgtggcatatccgcataatatacaagagtcacagctttgtaccatctcgcattcttctgatacagttcctgaaaaatatcaattccaagttcacgaaagcatttttctttcagcagtgcaaccacctgatcttccgaactgtcatcgatcaatgaattcggatatctgtcctctgacatcgtaatctctgccaatggaacttcacgcttatgatctcttatataattcatcgctctgtatcttgcgaacataagcatccatgtttttatctgctgttttgattcacttccacactgtatatatgcggtgaaaaaggcatcctgagcaatctcttctgctatgtgatggtttccagagtattttaatgcctctttgtatacaacaccgaagtattcgctgtatgcagccacaaaggcatctccctctgtaaactctttttccactttacgttcctatcttttatctgttaaattttcgataaaacatcttctttttcttcttctgtaagttcatgcattgtccatccaagtcccactttatcatctttgtgtcttggaatcatatgtacatgataatgaaatactgtctgtccggctgcttcaccattgttctggacgatattatagccatcacagtccagtgcttttgtaagctttgtaatcatcttctttgcaagaatcattgattttcccgcaagctcatcatccagctcataaagattggcataatgttctttcggaaggatgagtgcatgtcccttagctgccggatttgcatccagaatcacacgaaaatcttcatcttcataaatagtagctgtaggaatctctccatttgcaagtttacaaaaaatgcagttattgtctttcataatattatccttctttctctgaaaataaatgattgattatttaaaccaccaatgctaaactgatacctcagaaaggggcggtagttattatgttatcatcgacagaccatgacaaattacaacagattatacaggaacatcctgaaacagaagaactttttaaccggatttttaagtctcatcagatggatatcagcaccatcagtcacgaaatccgtaatcctctgaccctcgtttacagcacgcttcaacttatcgaatcacaacatcccgaagtactggaattcgctcactggtcagagcttcaccaggacatcgaatatatgaaactgttattagaagatctgtcttcttataacaacggtgaacggctggatcttgctccgttaagtaccggcagctttttccgcagaattgctctgtcctttgcttcttctattatagatacagatattgaattcacttcatacataccggaagatctgccagttctatctgccgattctgtaaaacttcgtcaggcactgctcaatcttcttcgcaatgccgctgatgcggtccgtaccgaatcaccttctcaggatcagcacgatatgccggcacactccccacagatctcattgtccgtaaccgccgatgcagatttgcttcatatcgaaatctctgacaacggctgtggtattgctcctgaagatcaggaacacatctttgaaccattcatcactcacaaagttgatggaaccggacttggtcttgcaatcacacgccggatcatccaggctcatcacggtacaattacacttagatcagcacgatatgccggtacggtatttatccttacgcttccgatagagaagaactcctgataaaaagccggcaagcaggcctcctatatgtgccatattatcaacaccaccactggtaaatccataatacaatgtcagtacgatcataaagaccaggcctctgccggatatgtctccaatccgtcctctgttacggattgccacatacagaagtgctccaatgatcccaaagatagcaccggacgctcccgccgatatagccatacttccggtctgtatatcccaccatgccgacagaacattccccgccagtccacttacgaaatacacaatgagaaactttacttttcctatgtcaagttcaagattccatcccatagctacaagtacaatcatattattgacaagatgatcatacccaaagtgaagaaacatactggaaaatagcctgtagtactctcctctttgtatcagatatggaacatacatggctccgtgcttcaacatgaattcaccatcttctgtcatccccagaaaagacaggaccagaaatacaatgacattcactgctgccagtaatatcgtacatggcgctttaatcgtattcttgttcatttatacgcttcattacctttcgctttgttcatcttctgtctcttttagtataacatagattacctgaattcttaatcattttattctatatttaactgaattttatcacagctcttcttcctctatatgcagtccgtcccagtcaccccattttgacttcttgtgtttattcaggaagcgctttaccggcatccatagattatccgtctctctcatgatcgaactccccatctcctgctccgatatccagtcatgttctctggtatcataatatgatgtcttttcccttcgttcctccagcaattcatcgatcatcgtttcttttcttatatccggaatcttcgtttcttcttttttcttttcttcacatgctgcaattagtttttccagactgtaattatcctccattgtctctttatgcaataaaaatgccagacgtacacattcttcttcctgataatccgcaacttttaccatatactccgtcaatatatgaaacttctcccatatatcctgttttgccaaaggataataacaaaaataatatctgccctcttcatagaaaatgtattccggatccatcaggatacaatgaatatccagaagataacgttccgcttccttaagtacatttcctaactgttccataaagtgccttatatcttctgcttttaatttcgctctggcatacatcgcctgcattgataccttaccacttacatcataatcataataactgctgccattaacacctcttcctcctacatgcaaaaagccctccggcgaatttgcttttaacattttcatctggtaatcctctttatataatacgtgttcttctatcgttatctttcgttccattatctgatccttctcattttttaatccttctgatatcccggatatatttctccggttctgtcaccgctgcacggctttctacagatattgccattttctttcgtcttgcagctgcctgtactttaatttcatcttttcccacactgctttgtactcttattcttgaaaataagatacacttccttcccaccctttctttgaataacgcatttaattcactctcgctgattccatccttttctctcacctttgtacttcccgtaaccgccgtttcatatgcggctcctgcaataatattcttgtcatgataataaaaagatatccttatacatcccatgatcaggaataatatcattggtatcagaaaagccatctccacggtaaaactgccctttaaccacctttgctttctttcctccatctcagattcctcctatacataccccaagcagatatcccactgtcagaaatggataaaaaggaaaagcaagtcctttcttttttctttttattaccacacagatcaatccgataattccaaggatgaaaaatgccgtcataagcacttccaaaagtccccagattcccagatatatccccaggatcagaattgccaggctgtccccatacccaatcgcttcattggtaattttactgatccataaaaataatatgccgcttaatccaccggccaccgacaatttccagtctacatttcccgtcagtacctgatagatgatcacccctgccatacatagcagaagtacatcccgcggaactttccgtattctataatccatcactgacagtcctgttaatacagccattgccagcaccttgcttattgtccacatctggaacaggccccctttcctgccgcctccgatatcggtattgcatatatcgtccgttttaaaccactgcacgacagcgaactgtgataccggtctcccgaattcgtaatataaatgtttcccccgtttccttttacacagtgttcacatggatagtatttgcctccgttttcattgcgaagtccctctaccagttccaaatgagtcatgcggatcgacagatccagatgcgaacaatgataatctttatgatatacaagtcctgtttccgttacatacaccgtatcatttcccgtatccatccacccttcccgttcatatccgctccacgcctttatcttcattttctcactgcattttaccggagcaatcccaaatagcggcaccggaatgactacctgatactctgtcgttaatttaccgatcccggttcgggccgacatcttcgaccgtgaacagtctattccactgctcccgcctcttacaatacttcttccaagccgttcttcacccactgcatacaccagatcattctctatccttgacggcatcagcatctgcgtcacacaactttctttagctgctttttttcctgcatattgaagaccgcttctcactgccgtatgtactgccatcatctccagaagatacaacatcgtaacgactgccagaaagaacaccggtacagcaaccgctgcctctgccgtcacgcttcctttctgtctgtcatcggaaaatctgcgcaatagttgtgagacggataaagataccctttcaaggactgaataacagataggttgtgaggggagtaaattgttactcataatgcgaatcctgctcctttctttgtttttttattataattttgggatatttttgatacctgaaagggcatctttatccgcctcatactattacatcttgttctctgattctttctactgataaccgtaatatgtccggtactgatactttattcctcttcttagattacacactgtacggatctccattcttcctgcacagtaatcgatccggaacgccggctgtccgtaaatgctctgcatgtttttctcaatgatgcccattgcccgcatagacatgcgttcctttccttccagaaataagagcatcctcatatagtctttgtatcccataccatcctgcacatccatgccggttcctgtatcttcatctgttccaagtttcataagaccggacaacgataactgccaattcgtatcatctttggtaattgcggccttttgcccgtctaagagtgacctgacatccataacggattctccatatgcccaggcaagcaggattccctgcgccgctgcctctgtaacagccgggactgccaggagtgtacataaagtcccggccgccgcccttgcttccgcctgttttgtactgctcgtctgaagataaatataattcggcacaaatctcaacatcacaagcttctttgccaccgtttccagattccctttgtcactttcccggcccgccagaatatattccagttcataatcaagttctcctcctttcggtccatcggtaaaatctgtaaaatgatctatcacatattctccgagcaaaacggacgtcaacgttccatcctccggttccacatctgaaaaagccccatatccggtatgattttctcttttttccggcatctcctgtaatgatatctgtttctccgatattgtcttatctttcggaagcacaagttctaagattggtgaacgtttcaattctgctacatgctgcatcggattttcctcttccggaagttctgcttcctgttctcctaaaagatccttaagctgatcattttgcttttcctcttcctcagtaaattcatccgctttctcttcctggttcttccagagagagacatttcccagatatttatccgcccacgcgatcccgtacttatgtttcatgtattttccgacctgatcacgaaataactctccgctattatctgtaaacaactgtatccgctctatctcattttccatatctgcaccgtaataagaaagacgatccagaatattctgttccgtgtaagtcccggtctcataaccgcattcaatggcaaatacgtcataattttccagtaattctttctgatattctgcaaatacacattccaatgcccggttcatatctgcccgcctgtaattctttgccatctgcaccgacgcactttccacaagagccagtatcaaagaaacgaacagaacaaaagtcaatgtcagatagactgtaacttctccattcaaacagtccctattcggccgcttttcctgcgctcttcggtatctgcataatctgcagccggccgcttctttcgaatgcataataacttaaattcccgaactttcactggtgattttttcaaagattgtctgcaccagactggtaagctgggatttgaagatgataacaagcccaatgagaaccaccataaatttagcccctgtctttttcatgccttaaaagccttataaacactggatttaaccatatagaccaaaacgtatcattcgtctattttctttgttttttgcacttttggtatgttgtgtgcattttgtagccagtatttttatttattcatatctatacaaaacaagacagaatgtacttgctttttaactgtacgttctgccttggatcattcaaattcaaatatttaatttttccttttatactttagatatttttcttacccttgccaattcttctcgcaactctgcattttctttttccaatttttttatttttagtttcaattcctgtatagtcatttttgcattaactaaagttctttccatagccatatcaataataatctgtttcggattatacgtcacgctctgttgatgcatagcttcatttaccaccctgcgcatttcttcatttcgataaaaaaatcctttagaaaagcctgttttttgaatcaatgcagcaactgttattttttcttttgattccaacatttcttgaatttcccgttttgcggtttctaccttctgtttgctacgttccaaactacattcgaccattttatcgtatttcatagattatcgtcctctcaaaaaacttgtaccacaccattctcacaatttttttagaacagaaatttctttcctactgacccgtttattcaatttctccagttcttgctgcaacagttcattttttcttttcaattcctgattttgttttgctaatttctcgttctctgctttggcttttaacaattcaattttcaactcaattactgaattttcaagttttctatccattgcaaccggatgtctattcttaaaaattgcttcctgtctatgtattgcgtcatccatttctcttctgataagctcatttttataaaaaaatcctctagaaagcccagttctttttaccagctctgctacggtaattctttccatatttttaagcatatcagatattgtattttttgcaatattcatcttcctctgactctcagcctgcgtaattgctaccatcttatcatatttcataatcgtcccatccctctatgatatctaataggatcatgtccattttttctcttacagttctcgtttcatctgccatcagtttgtttccaatttttcgataatgatgtaccgaatatatggaggtatgtcctagtaacttggctatcatccagtcatccacatgcatttctgtcaatttctttccatagcaatgtcggaaaatatgcgttccaaacttcagaagttctccattatcatcccggatatcttcttgacgaatcattgtcataatctgattttgaatcatgctatattgataaggtcttgttgaatcatctttttttacaaaaatgtaggttgtttccccataccgctcttttgtatagtcaattgctttcataatcagttgtgccacttcctcactgatagatttttcataggtaactgacttcacctggtcaatccttataaaatatcgattattccgcatgcttaggcagtctgtctttaaggtcagcgtatctgaaatcctcgttcccagtaattgatggataatcaatgctctgcatatctgctcatccattttgaaaatgtgttcgtttaatcttttaatttctgcatctgagtaaaatttgaatacatgccttggtgtacttggaaagtcattactcagaaataattcgctcatatgctgtcgttcatataaattcccaacatcttctattacccttcgtagtgcatacaagtcagatctgtaatttttccgatcatgtgcttccgtctgaagatatatcagatactcttctatatgcattcggtctaattcatgcagtgattgaatgtccaaatattttcttttaagaaattttgaaaaccgctttacagctgtcatttcactgtggattgttcctaatggggagtatttcaaatgcataaaaatcactttttttacttcttcccggatatcaggttgtacaattccagtaaaattaagcgtttccgtattcttgatcggatttccatgaataggaaaatcaaaatttttaagcgtccagatatctttttcctgctcgtctcggtcatcctcttcttccaaaaatttcaagattttcttcatatgctttacaatgctaggcgtttcatttcctaccttgtcatatgctggccgatatttttcacttgataaggcgtaccctttttccagcatccaacctttcaacatgcgaataattttttcttcttctctggcatcaaggctttgtattttccgatcaatcagaaattcccggatattattataataggtcacttcacttgccatgctggacggtgcaagcatttttcctctttcccatataaattcttccagcttttcggttatttcttcggatggcaatccttccagattaaaatatcgtactggactgatacgcattctctgcagctgttcttcagatgctgccttatagcaatccatctcatatatgtaaattctttttttcattttctgtcaccacgcttcttaactttaattgtagaagccaaatcattttctggtttcttaaagtatgtatcacttgctttttcaattctctttggcataaagtccacatactgttttgtcatctcttctgaaaaatgtcctaaataatctcggattgtctgtatagaaacatcctcatcataaaattgagtagccagcgtatgtctatagtcatgtgatttgaaaatataatctccatccgcaatcccattcttatcacagtacttctgaaattcctgtcgaaatgttcctacacggtatgctccaccattctttcctttgaagatgtaatctttcggacgaatgtgttcctgctcaatatacttacgcatgatcctatacattacaagcggaatcggtatcatcttatctgctttcatcttgatctgataaacttttaaccatgcatcttctccatcccagtaataggcatctccttttaacgtacacacttcactgattctcaacccgatacaccataaatgtaaaaatatcaaccttgaaaccagtggaaaagcatacagtttatgcaggatttccatataaacttgttcttccaccgttctatcatgatgttctggatacgtttttttcagataatattctggtttaaaaggtatctccttcatatatcctcggactgttaaaaactgataaaatttcaggtaatgcacaattcttttattgaatgtatcatctttagtgcccttctcttccagttcccgaaaataagtttccaattgattttcatctacctgacagacggattcttcttccttaaaatattccaaaagtctttttacctcatatagttgtcctcggatatttgctatcgttagtccaccaattccgacatgatatttcgcatattcctgcaacagttcccgatttcttttattggtaacttctatgaaactcaatcgctgaactggattacttggattaagccgatcttctgccagatgaaagcgttccatataccatacatttgcatgccaatgtatttctggtgcttctaaaaacaaaattttccggctgttatcaatgatctgcatagagtttttcacattgactaccttctgttccacaattttctcaaatcgctggatctgttctaattccaatccttccagattatcaatctcttcctccacacaaaaatcatataaccagtgtaatggcaataaatagcgaactcttctctctttgggatcgtctcgatacaaattatctaggatataattcagtagtaggaaaacctgcttttttaatttttcagatgctcttcttgaaaaatcccacaccagttcctgtttatcttggacatattcaaaacccttaaccaattccaaatctggtaagtatggcaggaatacaatctgtgcttgatattttctccgatgttcgattcttcccggcagattttctatttcttgttgaatactgtactgcttaatatgatcgaagacctttaaatatttcatcacattcgcttcatcccacattttttgcagttctgcttcataacggcttcgtaccgtatagtcaatctctttgatatgatgtattccctgccggattagaaaccgtttaatgtttcccttcaatgccccatctgacacttggctttctcggatttctaaaagcagctctccatattctgtttctatccaatacttctgtatctttcgcaatgcggatgactgctctttcacctgctttttcgtataattaccactatccaacaaactttgtttgtattctcgcaaatcttgttcttctgctaaaatcacatcataaatttctctttggataaggaatttctctgcttcttcccataattctctctgcaatattccgcctgacataagctgcttgtgaagatgttgtatctcttcttggcgttccgcttgcagcaatcgaattgcagacacttgatcgcctcctcttttttataacaaattctgaacaccatacattgcctgatgtctgttataaaaagcatcactgacttctattagttcatcctctgttatattcagatatttcatggtcgtttcgatattccgatgtccaagtgcctgactaatcatttctaatttccaaccatcttttcgccttgcatttgcaaaataatgccgaagcatatggggagatgctttaattcctgtctttttctccaacctacgtaacatggcatataccccgcttcccttaaaaggttttccaacataatcgccagaaacattaataaacaaatattcctgtcctaaaatcagttctttatagtcttcaatataaaacattaaaatatcaaatgttgcatcactgattttggctcttcgaaattctgcattttttgccctcgctccattctcattatcatcccggaaattgacatatattatatgtttttcatagtctatatcctctgcgtatcgtacacctaaaagttcccctattctgaaacctgtttctgctaataataaaagcaggacctgatctcggctgtttgcacattcttgcaacaactctacaatcttgtcctgctcaatgtttttcccttgatgtcctttttcttttaaataccctcgaaaactcttcctgttcaatatttttctgataccgattgaatttcgcacaatcatttgcgtatctgataataccttaagatttcccgaatgcttgttttcctgctccataaaaatatagaacctaaatacttcttttaagtatgcattacatgtctcattattaggaagttttaaataatcttcccggctatgcataccagcttttaaccaaagcagaaaatctgtaaaatgttcatgctgttcaatatatttcatttgataaatatcatccagacaaagttgcttttcatccataaaattcaaataataagataatgcaaaggcacttcttcgtatggtgttcggtgatatctttgaccttttcttatgcattaaatatttagaaggtaaatatacaatatctccgcttttattttctcggataaaatagaatttttcttgtttatccatctgcatttctactatatattttgccatagtaacaccttccttctaaatctttaacgctatacacagtatacccactttatgtacaaatagctattcatcaataccaacaattccactgaaaacacccctgaaatactactaaacttttcgtgcaaaatctactttcgctgtagcagaaccacgaacggttacaggtagtattccacgccttttcgatttcggataaagtgctgaacatccttgatatcttttgccatcttgcagctcggaagcgcacacatcacttcctcatgatatctgccaccttctcctgcacgctcgtctaaaatggacacgacacaagtgtctgtctcggtgcggagagcccgtccgaatccctgtcttagttttttctgcatgtctggaacaatcactgcctgaatgtattctttcagattagcatattccttcttctgtgcttcgctgatgggatctggaacagcgaagggcagtcttacaatgatcagcgaagataccatatctccggggaagtctactccttcccagcaggagccagctgcaaaaaggacagcattgtccatctgtttaaatcttgtgatctcttccggggaatgtctccacacctctatcatcgggaatggaatttcatcccttaacatctggtaaatgtttcccatcaaatgataagatgtgaacagcaccagcgtatgtccgtaagtcgaacagatcagcgaatgaatatgacctgctatcatctctgcctcttcctgacttcctcttctgtattttttcaaatcctttggcagatacaacagacagttcttctgatattcaaacggggagtctgccacatattcccggactctccgcactctctgtaatcctgtcattttccgaatgtgggaaaatccctgtccgttttttaaagttccgcttgtaagaatcgctcccatacctctgctccataacatctggtcaaggtactgcggaatccgtctgctggatgcacacaatataatccggtggtcatggtcctgctttagatgcagcacatacttcttatcctgatgaaaaaaacattccagtacacttctggtttcttccagcttgtttctgatccactttggaatcttcttttctaacttttctataatcttattcatggtctgtatcccctcatataaatacatttcacactcttctgtcatgtggaattcttcttttatcccatatctggttctgtggttttctcctatgatgtccagcaccatccggatcgcgccggacagtttccttatctccgatccttgatattcttttccaagataaaagcagatttcccggatatcgtcataacataggctcttcccgaacatctgctttgctgcatccggcagtttgtgtgcttcatctataatcaatgcccggtaatctttcaataacgggcggtaatcctgcagtctgtgataaccatcagccagcagataattgtgattgcaaatctgaatgaacatttcattatctctggaacgttccagatactgctgatacctgcatgagcctcttttcgggcagtctcccgaacagaactttggcacattcaccagccttcggtcaaacccacttaaattagacacctcgtccatatcataatgttcttttaacgacagaagagcttctttctgcaacgcatttttgttttttccttcgattgcaacgattcgttgcgccaacctctcatcgcagacaaaatgctcttttccttttcgtatcacagctttgataggggtctgaatcgtcccgttctcctgaagaatccgggagagaaaggggatatattccgtaagaattgctttctggagtgcaatgctggaagtggatatcacgaccggacgcagctcataaggggaacatccttctttaaggagagaatattttctcatcagaacacaggccaccagataggcatacgtcttgccgataccgacacccgcgtcacacagtgctatgtttcttcccagcaggttatccagcatttcgtggcataacataatctgttcttcccttactgccattccatgctcctgaaacaatacccggaagatcgtatcaatttcacgatgcgctctttttaaatattcttttgtgtaatacataatttgttacctgatatgcgtgctgataccacatcaatacggctgtaaaggatttctccctacagccgcatgtatctgatatcaacgacacattcttccttgatttcttatacttttgttttttggcgttgtatttgtcctcgactcccccattgccttacgggaacattacaggcggatgcttggcattgcaccgctcatggattttctaaaggtcttgctgattacaacccaaagtccatcctctgctcactggcagttcctatgtatcattatcccctcgtaagtgatcctcgcaaaagaccgccacgatcctgtttcagttaaagctgattcgctcgaaacaaaaacaccagcaaagaattttttgtattctttcctgtcattttcatttgtcctcgcgccttcctgatacgcttctacttacgggaacgtacctgtaatgctggtataggattgtcaaagtacactggcaaaatttacctgcctattaaatagccgacgaaattcgtcatttttgtctcaaaatttaaaattttttcaattttttccgcaaaatctttcttttcgtataaacggtatccttcggaagacccataatatttgcgatttccttaatcgaatatccccatgtactaagcaaaagtatctccagtgtctgatgctctgtatcctttaacacttcatacaaccgtctatctcccacatgatctaagagttcccggacatccattgcaaacggttcaccgtcctctgggtttcctgtatcaatctcctgcatcgtttcttccaaccgttcccggtatctgcgttcttccagaaaatcttcccagtccatctgtcttaatttccgaatcttttcctcgtccattcccagttcacgcagtttcttttcttcctgttctttccaataacgccattttcgttcttcactcgctttgttataagccattatctttcctccgatctgatttttgtatagaaatcaaatcggagcatggcggtgaccggatgcatgacaaactaccattttcgaaaaacatcgaaaaaaaaatgttgcaatctgttcgattacaacacttcttctttttacctttttgttttttcagtcaaattcattgatataaatccttctatcaagttgcttttaacaaaaaatcattatcacttttattgcataactttactttttataaaaaacgtttcattatgtaggttctcatattttttcatctttcatgatagtcttctactttattttttattaaaacaccatctttcaattcatatactacatctacatctgctatatcctctttataatggctgattaatatcactgttttttttaatcctgaatcaaatactatatttctaatttttcttctagattcttcatcacaatttgaaaacatttcatctaaaattataatttttgattttttcataaatgccctcaaaaaaataattttctgtttttctcctcccgacaaatttattccattatcttgtaccaaatatgaataccctttatcgtgatgtcctatatttaaattaatatctagttgttttgccatttttataatttcttcatcagttttttcactacctaaatcaatattgtcttttattgttccccgaaacaaataacctttctgaccaaccaccgcaaattgatttcgccattcatttaatcctatttcccaaatagttttattgcccatagaaatcgttcctcgatcaggtagtataataccgagtaaaagattcattatagttgtctttccacttccattatctccaacaattgcaattctactaccttcaggaatttttagattaacatcttttaatattgtatgtgattcatcatatttgaaatttacattttttaattctaaatcagattgcaataaatctatttgtatattattttttaattcttcttctggccaatctaataattccataaacctctttgccgaaggttttatttgtgcccacatatatggaatattcgaaaatactgctaatggatttgatacatacatagcataagaaataaatgcaagcaaatttccaatactcatattatccgtacagactaaataaccgcatactaaatatatcaatatttcaattattactcctgtagctgtttctaatatattttcgaaaccatcgcacatttccaatttttcatttatttctggaatatttttatagcactcaaagaattcttggttttttctgaaatagagattccaaagttttatttcaagtattccatttatttgatcaccaaaccaagttccaaatttctgctgttcatttatataaatttctgttaatttagttttattatttgctaaccaattcaccaaaaactgtttaataataataataattaaaaggagaaacgctatcctccaattaagcaacactaatcctattgttccaccaataatttgaaacaaaaattgtatcattagtaaactacttctatccaatagcaatgccactctactaatatcattattaattgtactcaaaagctctgccgaagtcctattttgagaatatacatatggtgcttttataatcttatttaatgctctttgatacatttcagatacaaattgattatttatttccacacatattttaatctgagccaatccattcccatattctatggcagcacatataatcaaaataatacaccaccaaataacaattccccaacttttcttgaccaatccgttatccgttaaagtactcactatctgtggcctaacaaaagtaattattgacgaaaccaaaactcccagaactaaaaacattgctcgtatttttgacaattgtatttttcctataatttttttaagcaattcaaaatctgtattccgtttcttatatagttttttcatctattatcgttcaccttttgagagtattcttttgttctttcataattttatcgcaaaaagcatcctgcttttcatttttccttaattcaactttaatatttccatcctttacaaaaatcaccctgttacaaaagctcgcaacatatgcatcatgtgttaccaagacaaccgtctttttcaaatctttattgatcatctgcagatattccattaccgtttccgtagatgcagaatccagatttccggtcggctcatcggcaaggatcagatccgaatgattcatcaacgcccggcagatcgctgccctttgtttttcgcctccggataattcaaagatctttttatccagcaaagccctaacgcccataatatcggccagcttttctgcttctgttatactctcttctaccggactgtgatccagaatctttggcagcatgatattttctcttaccgataaactgtccataagatagtaatcctgatatatgaatccaatttcacggcgtctgatcatggcaagcctgtcccctcttaacgaatcactgtcttcgcctttaaaaaagacttttccttccgtcggacgatccaacagtcccaataattttaagagcgttgtttttccagatccagattttcccataatggctatgaattcctgattattaatggtcagattgattccttttaatacgtctattttcgtttcattaacaagataggatctctttaacccttctgtccgcagtatttctgtattatttgtcataattttctatcctccttcttgcctttcgattcataatccaaaaatatattccatttattacaatccacactgctataaccgctgcttcctgtaattcacagattttccaaatatcgtttggatacattcttgcaatcattgtatctctcataaataatacgcttgaaatgatgagaataatggtcggaacaatccaatatatgtaccattctcttttattcattttcttccgttcttttcggtccattcccatggatatcagaaatttctcacgttccgctttttcttttttctccatttcgttcatggcatataacataatccaattcaacatgcttaatgtaacgataatatatacacagatcatagacttaacggctctttcggttttcatatccgtaattgctgtctttgatgaataatgaaattttaccgtagaatcataattgccgatatatttatgcttctcttcttttgattccaattctttatcgatttgatctatgtactttttatctgtctgaatgaataccagttttgttggtccttcaacaatataaggctctccatcatcaccatacatcgccttatacctacccaatttaaaaccagtcaggacttccgtatccttccattcattttgagcttttttgaaatattcatcggagaaaacgatcagattttcacattttggtgtactgtaacaccctgtaagactggagatttcttctccggcaactattttcttctcatatgttgtctcatgatctgcataatcacaatgttcacaagggagtccgatatgtaaagtcggtgtctttttgttatagtaccagtcgaccggctgggcttttgttgcccggtcctgctgatgaacaacatatattctttttcctgctttatccagatttaaggatttctttttatacgatggatccacagctttttttaacttgtaataagtagattcagagataccaatctgttgtccctggataataatttcccctcgtccctctaaatgttccgtcttatctgcgtttgcaactcttaccattggatattcaattaatgtagcatgatacttttcttttattttttcaaaaagcttatcgtctgatttatctgcaatacacataaaatcatatggatataaactttctgctttttcagcatttattgtaccgataaattgtattccgaaataaaagcagcttaaaaaactcatcagtgaaaagaataaaatatatctgctcacggtgttcatacggtaataaaaccgatgattcatcaaaagattcttataatattttttctgctttttgtgctttatacgttctaaaaaaatagaaaatatatttcttaagcttaaatacaatcctgcaaagaaagcgatgatcagatatgcactctcataatggtatattttagaatatgcataaacggaataaatacaaagtatgattccgatcattattttaggaactctgaattttccttccagcttttctattctcgctgtctcattcatatttgtaatgatcagaaaatcggattgcaattcttttaccagcaagaaactgagcccatatataaataaaatgaggatacaaatagacggatatgtaaagaaagccacccttcctaatttaaaatttatatgcaaagcacgaaccataaggatctttaatccctcggtcaatatttttccaacgaaaaatcctgctatgatggataccagatacgaaattgctgcctcatataaaaccatcgtttttaaatctttctttgatattcccattctttgtaaaaatacatattccggaatacgctttccaagatatgatatgagaactgtgatgatcagtataattccgcagaataatataattgttccggcagaaagaaagcttttgcttattccgtcttcctgcataaaatattctgaggaatgtccattggaaaacatctgatatccgctgactatagcatatgaaattgccgtcagtattgtttcgcataaaatcagaattcttaattctttatggtgtccctcaaaaattttttttattatttgaaaaaacaatttatcttttttcatttatttcacccactaattttttgaccgaacttctgtattaaacagtagttcggtcattttgttaatcttcatatattaatatcagtttaattccaaactgatgcttgagaagccgtataagcagatttagtagaacttacactatggcaactacacaagttaaagcaagcacttcctcttgttacgatacgaagattattttttgattttctttttcctaaagttttcatggtctcacctcctctcaatcataagaatcattcctatttattcaaatgctttttaatacatgcagaaattttttcaatggagacaaaagtataatattttatatcatcctctgtaaagcaaatatcaaattgtttttctaattcaaaaaaaacaaccaacatatctcttgccctcatcttaatcttttccccaaatagtgattcattcttcaaacaatctattgcacaatctttttctccaatctgctttataatctccatcactttctcttcaacatcttctataacaatattatttatttcctgtacttcattattccctgcataacttgacaattcatcaataatttgcattgttaaactacttaagctttcataatcgtcactgcaatataatcgttcatcatcaattttatttattttatcaattataaaatttgtcgataacgttaaataatctgctcttccttcttcttctgaaacagcaatgtctaaatatttaggtaatacatttatatatgcttttatacctacaattctttctatttcattatttacattttgactttcctgtaaaagttctgtaaaatatggtatatttacgatcatactatctattgatatactctgagacagcatatacaaatatgtaccactatcaccacataacttgtctgaaacttcaacaatatttcccggaacaacaacaataatcaaatctgggttctcttcaatctcacatttttttattcttttatttatgttaagaatattatttgaaaatgaaggtacattttcaattagttcttcttcaagtaaaattgccacacgatatccgattttcgccatttgatcgtaaatcagctccgcaacttttaagctttcattttgtgcatcaatccaaaaattcccaattgctaatattggtgcatttatctcttctttttctgtagaattcaatatatcttcttcactttttatacaaaagtcatagcctaattcttttaaaacagtataatctttaaaagtttcctccaccgaattccttacttgtttacaagtatctaaaatgtttttcctatcatgtgcaatacaatcatcacaatgtcttgcacaatttgtgcactctgaatatacccaacaattacaacattcatcatgcgtaattttttcaatattaagaagattttctactttccctctccaaaatccttcttttaaggttccaatcttacaacttttcgaaagttcgctaaccttttcacatgggaaaaaatctccttctgcattaacaaacaatcttgtaatcccaggtatacacggtccacttctatgaccagttattggcaattcatttctcattccattttccagtttttgcttaaaattaatcaaatggcgcaaatattctgtcaaaagaagtgacacttcttttttatcaattcttgaaaacagcgataaaaacaatttaaaaatttcatattgttcttcttccacatatcgactcgaaactaacactttactcttactaaacgattcactaatcccacttaatacaaattttgaatttttaaatagttcatcctctttaaagtaattatcagaacacaaaaaattatattccgttgaaattactgaattaaatccaacattttcattataaaaccgaggatacctctttctaaaatacttcaaattttctattattacatcgaatgatcctttatccgaattagcgaaacgacgacttctatcttgaacctctttgggaccgtctagactcaccgtaattttgaacttatatttttttaaatactctataaccaccggacttaataatgttccatttgtcgtcattgaatattcaatttctttatctttcattatattttcagcatacgtcacacatttttttattaattcaaattccaataaaggttccccaccataaaacgcaatataaacctttcttttttcttttgaatgttctttcaaaaaatctatggcttcttttgctacgctaaaattcattcgcttattttgatggctgcgagtattatattttcctgaatatagacaataatcacaccgcagattacaattttgagttacttgcaaaatcaaaatatgtattttgttctctaatgcatacggcaataattctgtatacggatgatttacattttgaactttattattttttaaatatccattttcatacagtatttcaatttcctcattagtatcagttttataacctttttcttgatttgataaacgctcatatgtatcttgttttatttttataatttgatttgtattaacatcataaaggtaatacccaaatgctgtttgaaacaaatgaataaacggattttctttatcattttgtctcataatattttacacctcttaatcttttcgtattttcggtatttcttttcattattatttaaataaattatattatttttattattttgtgtcaatcttatgtgataatatttttattattccataattgcattctacctctttttgagatgtaaaatagatacttgtgatatttgaaagattttaattatttataacggtaaaattcattcatcatacaagtaatttcctttaaagtaatacttctttcctcatacttcccaatcaaacacttctaatatttacgatattctgaaatcgatgtacgattattcttaagaaaaaaacaaatgaggagattatattatgaacaatttacaaattaccattgaaaactatttggagtattgcagaatacaaaaacgcttagattcaaaaacattaaaagcatatcgtatagacctacgtcaattttccgagcaaatttggataatcgaagcttcagaacttactgttccccttttagaaacatatatagcaaagttgcatcaacaatatgcccccaaaactgtaaaacgaaaaattgcttctttaaaagctctctttcatcatcttgaatacaaagaaataatacttcataatcctttcgccaaattacaattaagatttcgcgaaccaattatacttccgaaaaccatccctttgcctactattgaagtattgataaacaccatatatgaacaatattacaatgcttctagtaactatagaaaaaaggcttcccttcgagatattgctgttatcgaactacttttcgcaacagggatcagaatatctgagctttgtacaataccataccaaaacatagatcttcaaaataatattattataatcaatggaaaaggtgcaaaagaacgtctaattcatatatgtaatgaacatgtcatttctatactaatcaaatactattctaaatttggcaccgcaattcattcatgtggatatttttttgtaaacaatatcgggaaccctctatctgatcaatctgtaagaaacatgatcaacagatattgtcatcttgctggaattcgtcaacatattactccccatatgtttcgacactcttttgccacattacttttggaacagaatgttgacattcgttatattcaaactatgttgggacacagttcaataaatgtgactgaaatatatacacatgtgactatgacaaagcaaaaagatattcttaaagccaaacatcctcgtaaaagcttgaatataataaatcaattatagtagtttcaacagccttgcaagtaatctctttcaaggctgctttttagattcaaattatctatattcaacattttgttccattaaaaaatttattcctttatatttttcattcatctgatagttccgtttttagtggataataagaaattatcctcgaaaaataaatatatcggattattaggagaatattatgtacaaaaacaaaactaacttaattatacttatttcaggtgtgccaagtgctggaaaaacaacaatttcttatgaattgttaagacgtgtaaattgttttagaattgttcaagaaacagatattttacgtgaaatactgagaggatataaccaatttttagcagaaaccctacctaatattgctcaaaaaatagattatctatctccacatacagaactactcagttataataaggcaaaatcgcaatgtaaaataatgaaaaattcgattattgaaattataaatcgtcaaaacaggaagcaaatttctacaattatttgtggcgtacatataataccagaaatattatataaagatataaacagtactaatgtaaaatatattaatttatattttgactgtaaagaagatctctattcccatcttaaaacaagggatactgacaaatacgggaaaaaaagcgtagaatttttatataatatgaatgttaaattacaaaataatttttcttctctacaatttcagtatcctcatatgtttacatctattaatattgggaaattaactgttgaggaaactgttaactttattatcgattttttggaacaatagcttaaatttttataaatagaaagtcaagtgcttcaatagtggattgctgttacaacaagcaatcgcccccaaagaatataaactgaatcagagctaaatattcctggtacacaaaacataaacctgacaatttaggaactaacattccagaattgaatctcttatcgactgacttgactataatttataaaattgggctcttaacttttaaatactttacaataataactgttggagtgttgataatttcttatatctttacatggtgccaaacgcttttctatttcagagagcaaaaacactgaaataggggaaaatttgatgtatataaacttaaaacatattaatagctttattccatacatccatatatttttgaacacaatgttgccctttttttgaaaatacactaaatacttcaaaagccgcattagtcataatattggggttgccttttatgtcgaagtgtggcttacaatatataatgctattatctattctaataattatttcatctcttttgttagaatacaatcgacaacatttttgtaatactgtattagtgccaattattttttttgcacgtaacatagttgttcttaattctgatttaaaaatatcttgatccttatgtgcaaaattaacttcatctgagtcgggatttagaaacattaatttaaagtcaatgccatccatattcggcatcatagatttttcatctaagtattgaaataattcattgaaatttcctccaaacaatttcatgttttttcgaccataaatccacaaatattttccagtatataaaaatgattgaataatagttttccataattcaaaagtttcaaatccagataaaaaatatgctgttttttctctaaaaacaggactggttattgtaaatttatcaatagaacttaatttttcaaccaaatcctcgcattgaatatctatatctctaaattgttccttacataattcgatttcttttttaaagttttctatgatatgttgattagttaaatttccttttaataaaaaaatttccgtaaaatccttcagcaaatcaccatgacaaaaacttatctctcttgctatattcataggattatcaatccaagaatgccacattgaatcattatcaaataaaaaaggaataaccaccttatgtaagccactagcataacctgcttcatataatagccatggagatcgtttgttttcagttgtaaaacaaagaatcagtatatcacagttttctatgtttgatatgattttttcttgaacaaactctccggctttaatatcttcttctgacataaaaacatctatatcagaatctaatttttctattgtagatttaacgattttggcaaattcttcacttcttttctttgaccaacttataaatatttttttcatctctattcctttcaatttatcaatacagtaaagttatagttgctttataatattggatttatcatagataatttcttattatccannnnnnnnnnnnnnnnnnnnnnnnnnnnnnnnnnnnnnnnnnnnnnnnnnnnnnnnnnnnnnnnnnnnnnnnnnnnnnnnnnnnnnnnnnnnnnnnnnnnnnnnnnnnnnnnnnnnnnnnnnnnnnnnnnnnnnnnnnnnnnntattgtatgttctatttttatatttttttcgtttatttatattattgttagaattatacagttcttttgtttggaagtcaatttttttatcataaaataatatttatattaattctttttattttttttatttattatttttattgtatttccataaaaaaaagattatacttaataaaaagttacacaaaaaggggatatttatatggacttaacaaaaagtgaagaaaatatattagaaatactgttaaatagtgatattccactatctaaatcaggtattttagaacatgcacctgaggataaatgttggaaagatagttccattcacatactgttgaatagcttattggaaaagggagctattcatgaggctggttttattcgaaccggaaaaggcttcggaagaactttcgctcctacacaaaagggactttcctacttttctgatctcctgcttaatatttcgcaaaagtctcaaccttacaagatattttctcaattgatacaagaaaatgtttttacaaatgaagaattaaatgcattagaagaattaatcaaattaaggaaatagtattatgggacatttaaatataagtattttttctattatcagcagtttaattttatttaatattgcttcaataattataattatgaaacgaaaaaatacagcttttattgcaaagtatagtgtcaatttacttttactctcaacactattagcttttttaagactactttttcccatagatttatattatgcccaaattattaatatacataaaatttaccgtttttttaaaccattttttactttacaactttttaataattttactttatatcaggtattattgatcatttggttattgggattttttttatttggattttactttttatttctttctttatttgaaattcacaaattaaacaaactagaatctatcaatctccctgttatagagaatttgattcctcaatattctaaccgcaaaattattataaaggtatctaccaccatagatatcccaaaagtttggggatttcgtgcatgccatttgtatgttcccaatttttctctttcttccgaagaatggaagtttattttagaacatgaaatagaacatataaaactacatgatacttttattaaagtctttttacttttggtctctgcaatattttggtggaatcctcttatgtatattttgcgtaaagatattgaccaaatgttagaattgagatgtgatgccaagttaatagaacactattcaaagcaacaacaaatttgctatcttgaaactttattaaaggtattaaaacaaaaaaaggtctctataatttcaaattcccacaattatatgacagcttcttttgtaaattattctgcttattcgttaactcgacaacgatttgaaataattttagataataatcaccgaaataaaaaactgatattttgttattatgccttatctattttattatttataggttcttattttataatattgcaaccagctgaaattgtagatactacaaatacaccaaatttaatcttacatgtatcagatgaccaatatgaattatatgttaatggaaaattttcaaaaatattaaattcaactgatatcaaaacatcaaaatattcaaaatatgaaattatagaaaggagtcaataattatgcaactgaaaaaaatcaaaaaatttattttaaaggtgtgtccgtgtatcctaggtagtgcatttctgctacaggcatatgcgatgcctgtatttgccgatactctttcaaataattattcttctcaaagtatatctaatgccagagtagaacaagtcacttggaagtatcgtacatataagggcaaaaagcaacgaagactatggtcaattacttatgaaaaatggctgactgattggttaccagcataatattatataattattttacattatatcgattaaaaagtaggattaatccacattttctttaaggttaatcctacttttgttttactaatgaatatttctctctattcttttagtgcatgttcaacaaaaagccttgattttactggctctgctgaacagttaataagttacacatatctccaaaatagagttttctggatataaagtgacttcttggagtccatttctgatgattttaggtacaagaaataaaacgtctttgtttcttcttatgaaggccttcttgtttcccaaattcacctacactaacctctcatgtctaccaggatcaccatcctctgacagatcctaaattccttcgttctgcttatccatagttgggtgctgctcatgctcctttaatgatattttgttttctacttttcaaacacattaacaatcatattacttttttagctccataatctactgcatagtttctctgccgtacctaatcactggaatttccctcaatcgtgtaaactcttccaccttcacacttttctactattcctacatggtccgatgttccatcgtgatcccagtcgaagaaaataatcattccggtgaattgatatttattttaacatcaatccaagaggatatatagctcttttagagtttacacagaattaattacagtctcacgatttcatacagtccgtatttttacagaatcggtggaatacaccaccggttctgcactttatgcaaagaaagttcctattctttgttcatttaagttttcccctatcacaattacgactttctgtccttccgtgatcggctccagccgcatctcctgatgggtagcattcagttccatccatttatcatcgtcatccattaagaatcccttaatgcggaatacttttccacattctttatcagcaaatatcttctctgccgtctctattatctcgttttttgtcttatcaagattcataaaatacaaagatttgaacgtctctccttcttcgatatgcatcttacggtaattctccggcacataaccgcaggctaacagcttttcataatctgcactttcaaatgtctcccagtcttttacaaaaatctcatcccggaatcttctgttgcactgtactttttccattgcttgattcagatgttctatcgtattttttatctcttctgcggttgcttcctggcttctgctaagtacgatacatcccgcatttgcagtctcggaagccaacagatagtctgcctcatccgacaagtctgattccagcttcgcatcaacaactgtgatcacattgccaatctcataccatctgtcgatcggatcatcccttaatacatcaaagaactcatccacatcatagataccggacggttccacaattacccggtcataaccgcacattcccattgcaatcagcttcgtgcggaatcgtcttctgtggcagtctgcgtcgcatcctccggcaatcatctccagttcgcacttttcaccttccagatcctttaataacatcatatctacattaaccgcaccataatcattttccaagattccaatattatctcccttgtcaatcagatgctttgcatatttttttataaatgttgtctttccggaacctaaaaatccggtgatcagatctatctttaccatattttttgtaaacctttctttcgttcttaattttctaatgaatatccttcctgcctgagactttctgaatattctttcttgtatagtgtaacattttctgcccaactaagaaaacgctattatcagtaatttctatgaatactttatcaatgaatactaaaaaacctggcaccggcaacttttcttacatactttagtataaaaatgccggatgcaatcttacatccggcgctctcaatattttatatcattctttcaaacattcttttttcttctacactaacttatttcttcccaccaaagataaatcccataaatcggatataagtatacacaaccagaacaaccgcaataatcgtctcgatcaataccacatatttcaggaacggcatcggatgtcccatattcattgcacatgccatcatctgttttgaagcgatcgcactgatgacaaatgggaaggtgaatgccgcatagcttgggaagaatggcatcttcaaatagccgattgcttttacaagtgcaaagatgtagatcaccgttgcaactacaaacattcccatcagaaatccgtaagatttcggcatgacagactgcacatatcctgcgatacagaggcttgtcggtgccgcatagatacagatcagtggttttgccggatccggtacttctttcaccgtcacatagcggtatgtaaccaggatcagtaacaggatcagtgtcacaaatcccaaccaaaatgctgcacttccgattgcaagtttctcataagcaggtgccgtgactgatgcaacgacaattccaacatatacgatataataacttgcgaatacctttggcatctgcaatttaaatacaaatttcaccgtaaaataaatgatcagcacgatatgtaatgcgatcgcaaacagccagatataataagccgcctgtccgataaatggttttacataggtacttaagatcataagtgccatcggaaatgttcctgatacgcttgccatgatcggattcttcatatcttccttcacagctcccggaaacataattagcttcagaagtgccaggatcagcagaaatgctgcgaacactccacacacataacggattccttctgaatagctctgaagcaggttacctaaagctgccgctccaagcatgactccgcagattggaatcggtatttttttgattacatctttcataatatcttgtcttcctttctagtctggatctatgtattctagatatctgcaattgcacgacgttctgccggttcatcaatttcgtccagattcttgattcccagttcacgacagacaatctgtgctactttccatgcgcacagtcctgtgaaaaagatacactgttctttgtgctcaccctgtcccatgttgaattcttttgtcagaactctgcagcagattgcattcttcccattagctttcttgaaccagtcatgcagttcgtgaaccagttccatacattttacgctctttggattggttggcccgtcctgctctgttcttccgaagaacattccaagtgcaagcagacccccgttgaatgcgccacagacacatcccgatttgcctgctccgacagccataccggatgacattgcaatgacttcttttggtacatccagtttgaattcgtcacggatcgtacacatcagtgcctcacaacagtaatatccacttttaaaattcttctctgctgctctttgcaccgctcttgggctgatttctgttactccgatgttcataaattaatacctcctaaaataaattaaaaataaatcttctccgggcattccccaatgcccatatatttatattatagctatataaaatttatttgttaaagtgagattatctatagattctttgacttattcaatccgtctattttagaaaatttctatacaaaaagccataaatcttccactgtcaatttgttgacaatgtagaatttatggcttatccgcaactttttgttactttatatcaacttttttcttatgcgttatctccatcctgttctgtttcaggttcctaccggataatctccccactcttaattttcccgatccattcctgtataaactgcaggaagcactgtactgcttcattctccgcttcttcttttctggtaatcatacatactttccactcatacacatcatccgaaaatgggatcagtctcagcccttgttctttcatgtcatcaaagacaaaatccaccgtcacggatatgcctttattttccttcaccatcttatggcacaaactgaatccactggtctgaaatgcgatatccggttggaacccggcttcttcacatttctttatgatcagatgataaattgcaaactgactgctttcaatatatagcggcctgtttttcagatcttcaattgtcacactttcctgttcacttaacggatcctgttcatttaccagaagcttaatcggaaatgtttccaacggaactacatgatataactcctcatcaaattctccgatggaaaacgcaacatttccttcattttcagcaaacagacgctctgcctgcagatccgggtactccctgtaatggaattctatatccggatatttcttacaaaattccgcaatgcagtccggcgtcaccatacggatgattccatatgccgacaaaagatccactactttgcgctgtcgttgttctatatgcaggatatccttcttcacctgataataatcttcgatatccttatccgcatattctaaaaaacgtcttccgctttctgtgagctgcatgccggatttattacgtgtaaagagacggcatcccatctctgcctccaggttttttacgatcttactgatcccctgaggcgtcatatagagaatacgggatgcctttgcaatactttcttcttttgctattgtatgaaatacttttaaatctttaatgtccatgactatctgtcttcattctaactatcattctaactgtaacttaaactagccaaccagatgcatcatattgatcaggaatatccagctcagtccgtaataagatacaactgccacaaggtcattgaccgttgtgataagtggtcccgaagcaaccgccgggtctacatgaatcttcttaaagaacaacggaatcaatgttccaaccgctcctgagatcaccatcgccaacaacagtgacactccgatacatccggataccgcatatgcgaatacgaacgtctttcctttgaataatgcaatgtatagcccgatcagtgcaaacgacagaattcccaggatcgaaccgttcgagaatgcaatcttcatttccttaaataccagttctgccttctgctttccggtcagtgactcatccatcagtacacggatcgttacggccagtgactgcgtacctacgttacctgccatatccaggatcagtgactggaaacacatgataatcgtaagctgacttaccacttcttcaaacagaccgactacggatgaaacaaccattccaagtcccagcagtaccagaagccacggaagtctcttcttgatactttctcttaatggttctttcaaatcttcctccgcggtcaaaccggcgaacttcgcataatcttcacccatctcatcatcaaccaggtctaccatactctgggatgtaatgactccgagaagcttgttgtcattatccagtaccgggatggaatcctcggaataatctttcaatctctcgatacagtcatcgatcagctcatttccatatacatatgggtacgatgtcgcgatcagattttctaacggagactctcttcttgcgatgatcagatctttcagatccattgctccgtaaaatgtattatcttccgttaccataaataacgtagaaatgttatcgttctttgctgcctgttctaccagactgctcattgcctgcttcaccgtcaggttctcacggatcatgatgcagttcgttgtcattctgcttccgatctcttcctcatcaaaggaagcgatgattgccatatcttttctggcatcgtcatccattaattcgatcagcagatttttcttctctttcggaatcatctgcagaacatccacaactgcgtccgtctccattgccgaaaggatcgctgccgcttttttaatatccatctcatccagatattctgccgcttcctgttcgtcgatatgctcgaagatatcagaaagcatgtccagatctaggattctgcagatttttcttctctctgatactttcagctgtggaaatacttctgcaaggtcatttgcatgataatcttccagtctgcttctcataatacctggtgatatattacttctgatgatttccagtatctcgactgtgtaatctttgttttccatacctttacctcctgtccttttcctaatgcactataaccggatatacattttccggttttcttcaccataaacacactgcaggatatgtaacgatcatatcctccatgaaacgactgctattattcacttgtaatactcattgggaaataggataagaaataaaagaaatctatgatgcctgtaccgagaacttgccgcttagagcttctcttaaatgtacagcaattaactcaaacagaatcgactgttgcttaataaactttttaatttccatcctatgctgcaacttcgcccatgactatcgcaaccgtccattctgttcacctgccttttttgttgaattttatcattgattttctaactatcgtgtgcagtatcataactgcccgcaacatattatagactttcgtattatgaatttcaagcctttttccacgtactactctatatattttccacaaaattgtatataaatgcaaacactccccttcggctttcttcctatgatatacttctaaagttgtttttatagattagaggaataaaacaaaagagagagggtaaaatttacacatgaattcattgaaaccaatgttactgacttcactgaaatcttacgaccgtacccagtttgtaaaagatgtgaccgccggaatcatcgttgcgatcatcgcacttccgctgtccattgcacttgcactggcctccggtgtcggaccggaagccggaatcttcacggccatcgttgcgggatttgttatctctgcacttggtggaagcagtgtacagattgccggaccgaccgctgcatttgcaaccatcgttgcgggtattgtcgccaaagccggactggacgggctcgtgatttcaaccatccttgcaggtatcttcctgatcctgatgggcctttgtcacttcggaagtctgatcaaattcattccgtatacgatcacaaccggcttcacatccggaatcgccgttacgatcgtcatcggacagttaaaggatttcttcagagtcacttatccggacggcgtaaagccgattgaaaccacagaaaaattcaaagcatttattgaaaatatttctaccatgaataccgctgctttgatcgttggtatcgtaagccttgcgatcctgatcatctcaccggtgaatttcatctgccggctgtgaatctgcacattatagaaaatgcgcttccaaatgcatttaccattgctgtgcttgctgcgatcgaatcacttctttcctgcgtcgtcgcagacggaatgatcaacggaaagcaccgttccgacatggaactagttgcccagggcgccggtaatatcgcctctgctttattcggaggcatccctgccacaggagcgatcgcaagaaccgctgccaacatcaaaaatggcggacgcacaccggttgccggaatggtgcactccatcacactggtcatcgtactcgtcgtactgatgccattcgccggaatgatcccaatgccgaccatcgcagcaatcctgtttatcgtagcatacaatatgtgccagtggcgtacattcgtacacttaatccgcactgcaccgaaaagtgatatcatcgtgttatttgcaactttcattctcacgatcctgttcgatcttgtggttgcgatcgagatcggcatggtgcttgcatgtcttctcttcatcaagcgtatgagtgaggaaacgaatatcgatggctggacttacgtggacgatgatacaccggatgtggatgcacatctgaagaagcttccactgcagattcgtgtctatgagattaccgggccattgttctttggtgctgcagatgcgatcgagcacatcgttgtcaaagactttacgacctgcctggttcttcgtatgcgaagtgttccggcaatcgacagtaccgcgatgaacgcattatttaacctgacaaaagtatgtgaaaataagggaattacgctggtattctcgcatgtgaatgaacagccgatgaaggttatggagaaggccggattcgtggagctggttggacgggagaatttctgtccgaatatatcggcggcgcttgcgcatgcggaggaaatttctatttaattaattatcgcggcctctcagtccatgagaaaaacttggtgctctatttgctactaagattccgtgatgtaagccattatcaatgcttttttctctcccaaatcctgaaaagctgtcatctccgcatcgaatttctccgataccacagtccaggtcataattataatctttctgctttccttttatcttcaggtttatctctcctactccgcagtctgcttcgattttcttctttgcatcgcctgttgcagttatggaaccagccccacatttaaattctgccttttcagctgcaaattccaggatgttaacctcacctgctccggcatttacctcaagatcttttgcaagaatctgctctgcccttaattcaccagccttcagatccagctctgccttttccagttccatatctttcggaagcgtcacagtaatggttccttttcctatattcttgattcttttaatctttttattcgatgtaagatataaggttccatttttggcaaacgcacaaaagccaagcttttcatgtgtgtctttgctttctactgtaatctcatctgtatctgactgtgtcttcagatggattcttccttcgcgcaccgtactttttatctcatggatattctgatatgttgcttttccgttttcttctataacaccggttgcatctttcatgttcgctttctcttgtgcttgtactgtttcttcctgtttctgttcgtcctgatcatcgtctgtatcagtctcattatcttcctcctgatcatcatctatatcgtcatcatcatcatccggatcaccatatgtcttatcttcggatacccagctgatcccatgtggaaattgatgtgctatatctgtcagggtcgttcccattccccaggataccgaacaacatatgattccaatcagaaacatagaaccacacacgatccagaatattttccaacgtttcttcatctcttatgccaccgcctttctgtgaaatggttttcttaaaatatatacaattcctctgacgattcccggaaatacgataatacagagtcttactccaactacggtaccgattacaccgatcgcgatcaccatcagtcctgctccaagaaccgcaagtcccacacccggattggcgaacaggcttcctattcctgcagcaaaaagcacaacaccgaccatcaccactgccgcaaaaccgattacaatcgctgcaaacaaacagaacactgctattacaattcctgcaattaatgccagaatccctgctccaagcggtatcacaatcggaaatccgatcactacaattgctatgatcatggccaattttagccatttgtttgtccacggctttttctcctggctttcataatcataggttccgttatcctgatatatcttattatccttttcttctccgtatgtatcttcctgataatactggtatgtgttttcccggtcatgctgttccctggctccagagtatgctgcattttctccggttactttgccgattgcttcttcggttgttttttccgttccaccttctttgccgtcttctgtgtcttcccgatccgctttgatcttcatcgctactttttccggactttccagttcttctattacattctgctcattctcagaccctgcatcatcgaagtaatcattataatatttcaatgcatcgattctgtcctcttccgggatatcctgaagaagtctggacagcgtctccataaattctactctgttcattctagtctacctccctcaaacaattcgctgatctttccggaatattctttccattctttctgatacatggcaagctgcgttcttccactttccgtcactttataataacgtctgtttcttccgtcaaactgccggtcatagacttccagataatcccctttctgcagcctccgaagcaccggatataatgtagattctgatacatcaatcgcttttcttacatcctgcgtaatcttatatccataagttccttcatcttcccgcgatactaccgccagcacaattgcatccagaagagctgcgcctgtattaaaaaccatgctctcactccctttcgcattattatctaatattatttcgttatgcatattatatgtcgtataatatagtatgtcaacacatattgtttacattacaaaaatgtaaggttaaatctgcagaatctgtcaccgatagcttttctcgaacgtatgatgataaaaaaagcacacccggtcatcgcaaagtctttcaaataactgaaataatttcttacgatacacagatgtgcctttttctatttatttaatataaatcccctcttttagtgtaaaggaatatataatcttttcttttactttctttccggtcatttgttccaacgcttttgcataatagcgcagctgctcctgatacctttctgccagttcttccttccgtcttaccttgtcggtcttataatccagcacgacaagtccgtccggttcttcaaaataggcatcgataattccctgtaccagtatcagttccccgtcttcttcctccggatacagctctctggcatctattcccagtacaaatggctgctctctccaaagtctttgtttaccgtccgcttcccgcagccgccttcctatacctgactttgcaaactgcaggatatcttcccagcagatacatcttgcggcatcttcttctatccgtcctcttcttacctgatcatccagccagtccataaaatatttcttccagttttctttttccccggccgtatcttctgtaaattcaggcatccctttcatatccagaagttccataactctgtgataagccgtacctcttgcagctccggccagaacctcatcttcctgcaaaaattgcggaatcatcggcacaacttccggttcttcctgcagaagttctccttcttcttctcgttcttcttcgccgccatccagaccaatctcatatgcccgctttttcagctcggtaactgtaaatttcagctttctcatactgcttttttcgtacggatagatgaattcaaactgttctttcatcatatcatgaagctttggctcgtaaatctcattcacatcccaattttcaagaacagctctggaaatcccgcttttttcttcctcttctatgctttcttttaccacatcttctacatgtaagatctgaagttttaatggttctccttctgtacgcagaactgccggtaatatgaagtcccagtacgtcaccgcatggctcagctgcaagaatgataattcttttctcttatttccctgaaatacccgcccgtcagatatcttatcttcgggatttgaaagtgttcctgtaatgattagtttttcttttgcacgagtaagtgcaacgtacaatacacgaagttcttctccaagactttccaaagcttcttctttctggatcacctttttgataatgcttggtatcttagtcctgtattccagattaactgcatccagtccaacacccattccggcatgaaaagccacagcactccttgcatcctgcatattaaatcgttttcccattccggccacgatcacaacagggaactccagacctttgcttttatgaatcgtcattacccgtaccgtgtctgcatgctcatcttctatacttgcttctccgtaatctacatcgtatttctgaagctgttcaatatatcttacaaaatgaaacaatcctttgtagctcgttgactcgtacgctctggctttttcaatcaacatatccagatttgctttcctctgtgcacctcccggcatggatgcaacataatctccatatccggttgtttccaatatcttccagagcaattcatgcatcggtgtatacggtacaatctttctaaagtcatccatctgatccagacatttttgaagtttcagttgtatatccgcattctctccttgttctctgtacttcgtcacactctcaaagaatgcagtatccggatatgcacaccgtatttctgccagttcttcctgagatagtccggcaaatgctgaacttaagacagcagtaagtggaatatcctgccttctgttatccaagaccctcaaataatccatgagcaccccaatttcctgagtctgaaaatatccctcgcttgttcctgcataagtcggtattccttcccggttcaacacttcggtaaatacatcggcaaatcctttgatacttctcgtcaggattacaatatccgagtaacgcacattccgaagttcccctgtctctttatctgtaactttctgtgaacgcagaagttcccggatacgcattgcgatcattcttgcctccagttccctctcggaaggaattttctcctcaaagtcttcctcttttgacaatatttccaggtcactgtccatcacaagaatctctgtcttaacattgtcattttccggatattcagctcccggataaagagctgcctgatcatcatagacgattccgcccagtttttcagtcatgatctgtctgaatatagcattggcactttcaagtacttctttccggcttcgaaaattcttgtgcagatcaattctctgcgtcttactttcttctatattatatgtgcggaatttttccagaaataattccggtctggacagacggaatctgtaaatactctgttttacatccccaaccataaatatattgtatcttccgcttctgcagccagatacactggtaagaattgcttcctggatcaggttactgtcctgatactcatcaatcatgatttcttcaaactgcttctgatattcttccgctattttggacggaacaaaaccattttccgtcttctgcgtcagaatcctcagtgcgtactgttccatatcagaaaagtcgatcatattctgggcacgcttctgctcttcgaatctctctgcaaaaagccgcaccagatccgccagttcttccattgccggagcacatacccgaagatcttccaccagttcttccggactttcatagaaatactgggcgctcatatttttcacaatccctttgaccatttccctgatctttttgaccaggtcaatcttttcttctgatactgttttatccttgtttgctgcgatcctcgcccattttacattcaaaaatgcttccgcaaggcttttataagacgccctgttacacaattcttcaatgacctgcagatctttttctagtgttgcttcatatacggcaggcccttccggacttaatgccacattttccgcatagataagcagttcttttgcatcttccagattctttctgatatctgtcatcactttcttcatgatgctgcttccttccagtgcctttacatccgggatttcataggcttttacacaggaatccagccacgcttcactgtccggataacttctggaaaactcataaattttaagtatcagatcctcaatctttttatcattccggccggtactgtacgctgcggtaaagtcaagaaaacgcttactgccttcctgatatttttcctccagcatatcttccagtacatcatgtcttaggagctttaattcgccttcttcaccaattctgaatcccggatcaatatcaatcgcatgaaaatgatcacggatcacggaaaggcagaaactgtgtatcgttgtgatctgcgcattatggatcagagtagcctgctgcttcagatgttcattatccggatattccatcagtttcttttcgattgccagccggattctttctttcatttccgatgctgctgcctccgtaaaagtaacgatcagaagtcggtccacatccatcggagggtcatcttttgtcaacattgtgatgattcgttctaccagaactgccgttttcccggaacctgctgccgctgataccagaatattgcgattccgtaatcggattactttctcctgttcttccgtccacttcacacccatggctattctcctcctttctgctccatccgcattgcttccattgcttcttcttttcccgttgttcctatatcacgatattcatatcccgggattttcacgtcgaagccgcacacctgccggtatggacaataatcacagccgctttcctgtcctctcttatatggaagtgctcctacatctccatttaatatctttgttcttgcatctttcatctttttccgggcatgtaccatcattgcctggaaatcctctcccgcaactactttagagtatccggacacactgccgttcttattatatttcaccgggactgccatagattctcccgttgtatcccggtccagatgcttaaggatctctgcctttaacggtatgatcccgtctggtttcagctgctttaagactgcctgttctgcttcttctttatctttcgtcttatctacaatcggatcctggatccgataataaaatacgcccgcaggaacaacttctttctccgggtggcgtttcttctgaaattctattgccgcatccatatagatcataagctgaagctgcaggccgtgatacaatgctacgatatcaaacgccttgcttccagtcttataatccatcaccttaacatatacctgttcttcggtttcacacacatctactctgtcgatctttcctccaaagaaacgaagctcatatgcctccggcacaaaatctcctgccttaagctgattcgtaagtgcccatactgtgcgttccagcatctgtttcatcctgacgatcagttgttcatttctcgccgaactgtataacactgagttaccatagtctgtgatcgctgcctccacacattcatcgatcagttctttcctctgttcttctgtcaggatcgtccagccgcctgcttcagatgctttttttgaaaataattccagggcactgtgacatacatttccaagatccactgctttaaactcatataccggccgttctttcagacgtaatccatatgcaaggaaatgtgcacatgcacaacttgcataccgttccattcgggtaatacttccttcgaaattttcaccgtaaagctgctttgcaacgctttccgacaatggatcctccggacgtctgtagtaccatgccgttaaaagttcgtctactttttctttccactttggatctttctgataccaggtataaagctcctgccatgtgacatccagatttttctcctgaagaccacggatcagatattttacccctgttttttccgtcagttctttttgcaccagttccttctcatcctcatcccgtaccttcacatccggatacagacgcaataattcctgaatcagataggaaggtcttaatgccttcccgtccgcggacaccttgctgtaatataccttaagcttttccgatggtttcgtcagattcatatacagatagaacttctggacataagctttttctttacctcccgcagacaacgcatgatcagcctgacggaatttttctctgtcgcgttcagacagaagtcccgttcttaaaagcgcccccggcaggaaacagtcattggctcccacaaaaaagagtgctcttatatctttcagtctggtcctttgcatatctccggctaccacctgatctacacttggcggaataacgccgacccttgcttcttcaagacctgcatccagaagtttacaatactcacttaagcccaccggttcctctccgagaagtgccacaaacttatcaaacaactctatgatgatccggtaaatctgagaatattcctttgccagagccagttcccctgcctcgtgaaattcttcttctgttttcttaagtctttcctgaatattctcctgaaccataaattcatatactgccaaggtaatatcttttacggttttcctcttttgttttaaaacaaacatcagattatccactttttctaccatttgtactcggtaatgattcagcctctccagttcctcttcttccatccctttcatacgacggatccatcggttctgccagcccttatagccccggattccgagtccgatcacataattttccagttcatcgacctcttcataactaaatcctgcaagattcgtccgcaggaaacggaatacactttcataagagaaattcttctctgccatattcagaagacttctcaggtattctacaaatgaattcagcagaatacttctcttatgatccataaatacaggaattccatatgtttcaaatgcctgttccagatagtctccatatacattcatatcactgactatgacaccaatctcacgataacggtatctttcttttcttatcagtttcctgatctcttctgctacagccattgcttcttctcccggatttcgcgccacatgaattccaagatttttcacttctttttcatatgttcctgctccatatctgaaaatattccgctccagaaatgccagctctttatttttctcaaaacgctttaccggatatccatacaggcagaccggttcctctaccgcaatgtgttcttccctcgccagactgattaatgttgtcaccatctgcttgctcagtccaaacagctgatatggatgtctgtaagaatatggattctccctttcatccatgataaccgttatccatacacccttacaatatttcataagctccagaatcagcctgttctgcaccggtgtaaagcctgtaaatccatccagtaccactgtgctgttctttaaaagctctgattctctaacttctcggctcagcacatctaacaactcttcctttgtgatataacgttctcttaaataatcctgaaaaccatcatataaaagccggatgtcttttaatttataatataacctggattcttcatccagcgaatctatcatatcatccagttcttcttccccgatatcatattgtgtaaattccgaaatcacggatttgacctcagagatataccccagtttcttaatatttccctttaggacagtcagtttatcctcataattccctgcgatctttcgcaggatcagattctttccctcatcatccagtaccggtattttctttactccggtctcttcaaacacacggtatgcaagacgtgcaaagctcaatacatcaatattcatgattccgtgtctcggatgcatgcgaaccagatctttctgtgtctgcattgtaaactgctccggtacaagcactatgaaattctcctgtggatttttttcagattcttctatgacatgctgatataaatacgttgattttcctgagcccgacggcccaaatacaaattttaaaggcataaggtttcctccttatgccctagtataacacgaatatatgtttgttgtatacatattagtctacaatgcgcgaagtctttctgcaaattcattgcttaatgttacctttgcaatatagaagacatcacctgtcatatatacattccagtcatcttctacttctacctgaagttctcctccaggcatatgaacgatcactttactgttagtcagccccagtttgtatgcaactcctgccgctgcacaggcacctgttccggatgctcttgtataacctgcacctcgttcaaaaatctcgattgcgatattttccttatcgatcacctgcataatctgtgtattgatcctgttcgggaaatatcttgcgatctcagaataatcaccgatcttacataccagtggttttgagatctcccgcatcggaatgacacaatgaggattaccgatcgatacgcaggtaaccggatacaacgttcttccaaataccatatcctcattgatcacttctcgtctttctccaataacaggaatctcatcactccagaaagataattttcccatcgatacacgcaggcggcttccgtcctcatttaaaaatgtaacttcgaccggaccgtttcctgtatataatttaaaattctttttctgtacataacttgcatctttcagatattttgcaaaaatgcggacaccatttccactggtctcagattcacttccgtccggattccatacttttacgtgcataccgtcttctttcagaatcggtccttcaagtactccgtctgctcccagtccctcattacggtcacagagcatttttacatttgcctcatccagttttaattcgttatgattcggatcaaataccagataatcattgccaagtccatgataacgttctactactaccttcatctttttttcctcctgatctttgttccctgcttttttatattgatcgcttttatattttctgttctatatatctttatcataacaggcattatttccatattctacgtaaataatgctgtatttcttgcaaataatgccattttcatataaactttctatagacagtccaatatatatccggggaggtaccgataatggaacaatatgagaaaaaaggatacctgaacagcgaattccgtctctttcatctgacagatcaggagacaaaagaagtagactaccactatcatgactttgataagatcaccatcttcatccgtggcaaagtaaattacatgatcgagggccgttcttacgatctgaaaccttatgacattgtacttgtaaaacaaggcgatatccacagactgaccgttgacaattcctgcccatatgaaagaatcattgtctatatctcacctaattttatgaatgcttatcagacagataattatgatctgagttattgttttcaaaaggctgcaaaagaacattccaatgttctgcgtatcccatctttcgaaaaaagctctctgtttcgttctatctctcagttggagcattcgtttacggatggcggctatgcttccgagctttacagacaggttatgtttctggaatttatgatacatctgaaccgggccgtaagaaagaaccggctcgaatatatcgatactgataattgtaatgaaaaggtgctcgccatccttgattatgtaggcgaacacctctgtgaaaatctgtcaatcgatctgatcgcagatcaattctatatcagtaaatattatatgatgagattattcaagcaggagaccggttatactctgggacaatacatctcccagaaacggctcctgcttgcgaaagaacttttatctaccggtgcgcctggcacacaggtttgttatgattgtggttttaaagattactctaccttctccagagcttataaacaattgttcggtgttacgccttcgggccgtacctgtccgtaaagttctgccggaacaaaagcccttacaaagataccatcttcccggtattcttcttcctgcagttccccgtactttcggatcagctgaatctttcctgcctctttatatggataaagtgcctcaatctctactttctgctcccttaatactgcttctacagattgaaggaattcggtaattccttcccctgtcctggctgagatcttcacataatagtctgcatgaagatctctcggcacccagatatcctccatacggtcgatcttattaaatactgtgataaccggtttgtctttcacacccagattctgaagtgtttcatacactgtatgcatctgctcatccatctgcggattagaagcatctactacatgcaggataatatctgcatatctggcttcttccagtgtacttctaaatgcctcgatcagatgatgcggaagttttctgataaatcctaccgtatctgtcatcaggatttcctgaccacttggcagcttcagatctctggttgttggatccagggttgcgaataatttatcctctgcaagaatccctgcaccggtcagcgtattcagaagtgttgattttcccgcattcgtataaccaacaatcgcggccaccggaatatgactgcggcttctctgctctcttgttacttctctgtgcttctttacatcttttaattcacggttaagctgtgcgatcctgctcttgatcaggcgcctgtccatctcaagtttcttttctcccgggcctctggttccgattcctcctccaagcctcgacatagccttaccaaagcccgccaatctggtctgctggtactttaactgcgccagttctacctgaatcttgccttcacttgtagatgctcttgccgcaaagatatccagaatgatcaatgttctgtccattacttttacatccagttcatcctgcagattcttcatctgtgccggagaaagttcatcatcacatacgattcctgtcgccctaagctcccagatcatacttttcagttcttcaatctttccttttccgacataggttcccggatgttgctgttctctgttctgaatgaccattcctacggtctcggctcctgccgtggacaccagatcttttaattcttccagagattcttttgtatcatcctgatctgaaagtgatacaccgaccagtattactttttctgtttcattttttatttctatcatactgtttccattttctatagattcattccatttatcttgttttcagaaactcggcctctttttttgccgatttgtcattcggataattttccagatactcttccagttttacctttgcactttcccagtcttccatctgttcatatgcaacaataatattgtactgcatctcttttttcatctttttaccggaatcttcctgtgccaggccaagattataataatttaatgcctctttcgcttttccgagtttcagatcacagtttccaatcatattatagatggttcccgtcttttcggcatcattttccagtgctttcttaaaagcttttcttgcacctttataatccttcttttcccatttggcaattccaatgccacgataggcatccccgacatttttcttcttatctactgcctgttcaaactgttcgattgcctgatcatattttccgtcttctaagtattctacccctttttgggatggattgccgcaggctgtcaataatacacctgtgcaaacaaccacaagtaatgccttaattttcttcatactttccttatattctcctcatctactcaatctgccagtcaattggctctactccgtgagctctcagataatcattggtctgactgaatggcttacttccgaaaaatccacgatatgcggataacggactcggatgcggggctttcaggatcaggtgttttggattcgtaagcatccttgcctttctctgagccggtgctccccataagatgaaaacgatcggacgatcctgactgtttaatgccatgatagctgcatctgtaaattcttcccatccaatatctttatgcgaattggcctgatgcgcccttactgttaataccgtatttaacattaggactccctgctcagcccacttggtcaggcagccgtgattggggatcgtacatcccagatcatcatgcaattctttatagatattcaccagtgacggcggaatatctactcctttcttcacagaaaagcaaagtccgtgtgcctgtcctacattatgatatggatcctgtcccagtataaccgcttttacattatgtaaaggtgtcagatgaaatgcattaaaaatatcatctgcaggcggaaatatctgtcttgtcctgtattcttcgttgactgtttcaaataattttttataatatggctttttaaactctccttttagagcatccagccagtcattattaattgctgccatgttttacactatcctttttcctcttatctttgttcattcttacagacgaacggatacaccttttcctcttaaatattcttttacttctctgatctccagttccttatagtggaataatgatgctgccagagccgcatctgcttttccttccgtcagtgcatcgtaaaaatgttccagactgccggcacctccggatgcgatcactggaacattcacttcctcggcaattgctttcgtaagttccagatcatatccggcttttgttccgtcacaatccatacttgtcaaaaggatctcacctgctccaagcttctccactttcgaagcccattccaccgcatcaattcctacatcgatccgtccgccattcttataaatattccagccacttccatcttcccgcttctttgcatcaattgcaacaactacacactggctgccgaacttttctgctgcttctgatatcagattcggtgtattaattgcagatgaattaattgaaatcttatccgcaccttctcttaagagtgccttaaaatcatctactgtacggattcctccgccaactgtaaatgggatgaatacgttttctgccaccttgcgtaccatatctaccactgtacctctggcatccgatgatgctgtaatatcaagaaatacaagctcatctgcacctgctttatcatacgcttttgcaatctcaaccggatctccggcatctcttaacgatacaaaatttactccctttacaactcttccgttatttacatccagacatggaatgattctttttgtatgcataatgatgtcctccctataattccacaaagttctttaatatctgaattccgatatcactgcttttttccggatggaactggcatgcgaatacattcccctgttctaccgaagcatggatatgtgtactgtattctgtcgtagcagttacaattccctcatctgctgctttcaaataataagaatgaacaaaatatacataggaatcttccggaatccctttgaataatcttccgttattctggaacttcaaagagttccatcccatatgtggaatcttaaggccttccttatccgggattcttagtatctcacctttcagaattccaagtccttccacgcccggcgtctcatcacttcgttcaaataataactgtaaaccaagacagattcccaagaaaggagttccctttgccgtcacatccctgatcacctcatcaagcccatattgtctgagtttactcatcgcatctccaaatgctccgactcccggaaggatcactttatctgcattcatgatcgtctctctgtctcttgtgattattacttcctgtcccagaagctgcatggctttctccacactctttatatttcctgcatcgtaatcaataattgcaatcatcttgttatcctgcctttcatatgtggtatatcagggatattgtcccgtacattcactttatattatttgtcaagtgaactgttatggtttattgtacatcaagttcaaaccagaattcaactccattgtcataattctttacaccatactcctggttgaatgatttcataattgcttttacgattgaaaggccgattccgttgcctccatattctcttgtatgggccttatctactttatagaatttatcccagatatgaggtgcatctgcttccgggatcggattaccggtattaaataccgatactctcactttgccgtctttttgcaccatcttcacttcgatcaccatatcgccgctgacatgatgacatgcattacttacataatttcttacaacctgctctactttaaactcatctgcccacgcatagatgtcctcttctgtgtgcaacataatcttggcacctgcctgatccgccatgatctccatactctgcagaacgcctttgaccagtgcagtcagattaaatcgttcaaacacgatatcttcatcaccgaattccagctggttcaatgtcagcagattcttgaccatctgattcatcttggacgcctcatccataataacatcacagtagaattcccgactctccgcatcttcattgactccttcttttaatccttcggcatagccctggatcagagcgatcggtgtctttaactcatgagatacgtttcctaggaattcgtttctcatcttttccagcttgtctttctgttcgatgtctttctgcagactgttgttagctttcttaagttcagagatcgtgctctccaatttctctgacatccggttaaagttctctcccagttctccgatctcattgcttccgccgctggtgtatttcgcatcaaaatcaagatctgccatccggtcggataatctcgcaagctcccggatcggatctgtgattctttttgagaaataccagatcagaagaatggatacaacgatcagaacacttcctatatataataagaaacgattggatatcgacgcactttcacgcatactttctaccggacttcgaagcaggaactgactgccgtcatccagacttccccacatatcaacataataactctgattccacggatcccatgactggttgatctgatagacatccgtagaatccagtgtccggctttctttttgtgcctgattcagaaaatatcccatcatctgattcttcaacatattcttgtcatgcacattcgtatgcacatcattatccttttcaattaccagataagaaatattattcttttcagcgaaatgaatgagtgaattattcttctttgtgctgtcccatttatcttcatttgatacgtcatttaatttctcataaagttctatgaaacgggattccttcttacttatataatacggctccagaaattttccgttgatgaacatcaatgtcacgaccagacagatcaacaatcctacaaatgatgtgatcatctgcgtcttaatcgaatgatgtacactttttatcttctgtttcttatctttacttatgatcttcatgcttcatcaacctcaaatttatatcccatgccccagattgtcttaatgtaatttcccttttctccgagtttgcttcttaatttctttacgtgtgtatcaatggttcttgcatctccgaaataatcataatcccatacattattcaagatcttctctctcgataatgcaatgccctgattctctacaaagtatgacagcagttcgaattccttgaagcttaattcaatctctttaccatcaatcttcacctgatgtgcggctttatcgattacaattcctcctgcatcgatctcgtcaccaccgcctaatacattggctcttcttaatattgcattgactctggctaccaggatcttcggactgaatggcttggaaatatattcgtcaacccccagagcaaatccctgtaattcatctcgttcctctgaccttgcagttaacatgatgatcggcacttttgatgactggcgtacttcacggcatacctgccatccatccattcttggcatcatcacatccagaatgatcagtgcaatatctttttcatcataaaatacttccattgcttccatcccgtcgccggcttccaatacctgatatccttctcttcccaggaaatctttcaccagttttctcattctgctttcatcatctactactaatattttgatcttatccataagacccggccctcctcttaaatttatattttcatgatatatttttctttgatcttaattattatagcagagaactatgtagcctttgtgaagtttccggtatatagaataaaaaaagtacccacagtgtcatattacttatgttaccatgggtactttttcttaagttactctaatctgtaatttgttgttttatacaactcatactattcttcatcttctcttttccttctcttaagtgagaatcctccgattccggctccgagagatgttactgcaagtcctagccacgcaaacatgccagacggatctccagtcttcgcagcttttccactcttcgtattcgatgtggatcctgtcttaccggatttgcctgatgtaccggttgttccatttgtaccgttaactttctgtcctgcatcctttttcacaagtgcactgattgctttattcagcttctcagttgctttatcaactgtatcctgatctttcttttctttcagtgctgtgtcagcctcagccagtgctgactgaagtgctttccagctgtctgctgtataatctgattcttttaaagcacctgctgctttaattgctttttcaagtgcatctgttgatacttctttcgtcggctcatccggtgtcgctgcttccagtgcgtcgattgctttgttcaggctgtctgctgctttatcaactgtatcctggctctcttttgcttccagtgcagatttcgcttttgtcagctctgactgaagtgctttccagctgtcttttgtataatctgattcgtttaatccttctgccttttcaattgctgctgcaagtttcgttgtatctacttcagatggcgccggagtttctcccggaactttgtatgtaaatgtaagaggtgttgtataaccagttgatgtaatcgtgatctggaattctgttccggccaccgcatctttaaatggcgctgcatctgtcaccagcgttccgtctttatcaataatctttacagaacctcttccacttgctgcataatcggtgccgttcacatttacagatgtaatatttccgatataagtattgaatgcttcctcattactgttttctgccactgtaagctttttgttatctgcatcatatgttgccggcatatctgttgttgacagaatgaatgttgttttcaaatctgcatattttccatttttatcttttactgtaagtgtatatttccccggattaattgaagaatctgctttaaatgttaatacattgccttctactttcacattcaatccttcaacggtgtattccggatcaaaatcatccctaagattcagctctatcgccgtcttaccagcagaaatatctgcatctgcaaccttaacagcatcctctgtttttgcaaattttacagggacataaagatcattaacatcaattgtatatagaccatttgttgtataatattcaatactgtcaatcgtcttgcccatcatagatgcataatgcgctgaagatgtcgggcaaccatgtactgactctgtatatccggtactccaagcgagctcatttcctctccagatgttctccagatgacgcataccataggcagttccatctgttgtctttacaacgactgcatttacattagaagatgcaatcttatcttccggaagtccgtccagattgagctggtaatctccataagaagactgtgttaacaattctgccgtaacacctgtcagagcttctgctttctgtcctttaacctcgctgaatacaagttttccatccttgtccatagaaacttctttgtaatttgcaggagcctctgtcaatggatagtatgcatatgtctcgttttcaaaaagtgtatcttttccttctaatgttgtggtagatgtctgtccacggtttgttactgtaatatcaactttatccgtatcttttacttctttgtattttgtaagatctacggaaggatctacttttacagcaaatgtaataccatcaatcttcgttccatctgtgttttcatgataagaaccacctgcaagtcctgtggtacgtgtcttattctttgttgctgaagtaaatacgtcaacatctacgtcattctttgttgtctctgatttgtagaatgctgcgtatgggatgttcataagaacataagtctcttttttctctgcttttacaagtgcgtcgattgcttcattcagatgactggttgcttcatcaactgttgcctgtgtatgtggagtttttatttcatcttttgcttcctgaagctctgtctgcattgccgcccagctgtctgctgtataatctgattccgtcagactttcggctttcttaattgctgcttccagatttgttgtactgatctcttcttttgcatcttttacgatgttttcatcttttgcctggaaattatatgttacatctttataacccagtgctgaaattgtaattgtccagtatcccgttccatctgttccttctggcaatgtacaacgcagtgacttggtaagtccaagctgaattcccattgatttatgcatccagttatctgctgcaaattttgttccgtatgttgcttttgcattcgtgtatgtactgtcatctccatagtatgtccattttacactctgcatatttgctccgaggtctccgtaattacccgtcagatctactcttaagaattctccataagagccctttgcttcttttactgtaagtcctgcttcttctgctgttggtgctgtttttaattcctggccttcaattccagattccgttcctgtctcttttgctgagaaactgaatgttccatccgcattcttagttgctgtcttaagtccatttgtatctgctgtaacttttgctttcagacctttgtatgactgaagtttattctcggcaaatcctcctgcaagttctccaccgttttctacaactttgtatgctttgcagaatgcttcataatcttctgtcgctacttttaccggtacatatttcagtcctgtaacatcatattttgtcatcttcgttgttgtttcgtcttcttcggtgattgctccacggtcaaatgtaatcgtttttccatctgtcagaacagctgtctttgaatctgtccaatatgacacttcataagattttccattttctgcctctatggttgccgcacactgataacttcctctgtgaagtccatggttcaccgttgcacgtgttacaacatcaaatgcacctttatctgactctccttttgtatccaattcactggatgatgaactgtctcctgctgcctgtactccttctgctgcccagtattccgcccagctaagtcctgcatagacatatttatattcttcttttactgctgctttcaagttatcaattgcactatcaagattttttttcgctgcatcgactgtatcctgagatttcttttcagcgagtgctgtctctgcagacgcaagtgctgtctttaacgtattccatgtctcagctgtgtaatcactttcttttaatgcttttgctttcgtaattgaagcttccagagctgctgtatctacagttgctgctgtacttgcttctggtgctgactggattgcttctaatgccgctttttttatggcatcagatgatcttgttgcagtagatacggtatcccaactattaattgtatcttctgttgctgactgaccagctaattttgattttattccctttgatttagaatatgctttgttaaaatatgaatcgttaccagactcatagccattttccggagttactacaatatcagaaaactttccatcttttacagtcaaggctactcggacatcatattcattccattcatcttcatcatcatcctctgttcttgtgacatgtgcagtcttcgtatatgttccatcttttgccacctgatctttcgttaccgccatcgccggtaccgccggacaaatgctggctgccatggttgccgacatcgcaactgccattacttttgtcttcatttctttctttttcataaaagcctccttaatgaaaatatttattattaagttagtattttctaacttataatcaaaaaaaattttactaatcagacatgtgcattttccacacatgtctgcatattatgttattttatactccaagccagatacataatccaagtaatatcaacgctcttaaaattgtaaaccagatttcattgcctctgatctttttcactccgcagtgaatattcttcttcggacatgtatctatacatttctggcactggaaacagtcgccttctactttccaggaaccatccgtcggaagtccgatattcgccggacattttctggaacatgcactgcactttggaatgcaggattcccggtctctgcgaagtgcaaataccggcaacaccggaaccagtgagaatacagctcccatcgggcagaaatttctgcagaaaaatctttcctccagacacattccgacaatcagaaataccagaatgaccaaccctatgagatatccattcagtttaaaatttcctgcatgtatcatggaaaatacatcccaaggacttgttccctgtgctttactgtatacaccgccatagcacataaatacgatgattaccagaatcacatatttcagatatacaagtctgtctgcaatccggtccggaatctgcaccggtttctttttcatctttttgcagatcagtctgtataatgcattcactccatcgccaagacttccaaatgcacaggcgaatccacaaaagaatcttccgaaaacagcagtatatatacacaccacaataagtacagtaacaaatgatgtcagcgccactttttcgcctgcgccaatctgtgtaaatatatatttcacacctgcaaatgctgccgtgtataccgacggaataaagataaaatacagcaattggatgattgcccttatccatatatgtatctttttcaattgttttgcattcatttattttaccgccttttctaatgcctgttttgtcgcattcttaattcctgtagaactgaaagtcgcaccactgatcgtatctacttctgcactttgcgcatccagaatcttcggtataatatctttcgccatagtcagataagaaccatcttctccgtcagcagagacaatatttatttccttaatcttctgcttttttactattacttccactttaacagttccaccaaatccatccgcttctccggtatatgttccgtctttataagaaccgttttttgaatcctcatcttctaaactttccgtattttcgattttggcattcagttttgcaatttcctcatcttttgctctgacttccagcacggaattatatcccaatatcaacccgacgatcactacaacactcatcaggcgcatccagaattctctcattcttctctctcctttaactcagtctctttttactgtctttttgcagaaagcaaggcgttctcacatgcatccaggattgcttttgaagtacaggttgcacccgatactgcatcaattccttctatattacctttctcgatcagctgacttgtcacaccttttttattcgatgttccgtttgcagcgcgaaggatatatctgtcattcgatgaatctccgtccccttttacatcagtaacagcaacaatcttgtcatcccgcactgtcactttcaatgtcagattataagccgtgaaatcttcatcttcatccggtctgcacagcgcacgtccttcatagataccatttttatatactgtagtatcatcttcgccatcatcttttttctccagcagtgccagtgcctggttcagattctcaagagcctggtccacatcttcctgactgatctctgtcttatctgcatcaagcagcttctgtgcgtcttccattctggtcttaagaaccgcataggttgcttccgtataatcctcttgtttcagttcttctgcttctttcatcactttttcaagttctgaagtatcagctttttctttatctggttccgttgtctgtccgtttgttaccttttctgcttcttttaatgcattcttcactgcatttataagaccatttgaactgtaagttgctccggatactacgtccacatccgtactctgttttttcataatattttttactacatccattgcacggttaaagaatttttcatcatcatgattctttgttacgagcactgccttgattgatttatcctgaagaaccaccgctacttctatctctccgttgtatccttctgccgttccgtaataaataccttctttatatgggaaattgcctttaacagtcgtattgtcttctgtcttagaagtatcttccgtcttcgtatttacagactgtgaatttccgcttactgcagcctgacggagtgcgtctcttaccgcactcttgattccgttcgaactgtaagtcgcaccggagattacatctacatttgtactctgcgatgaaataatattgccgatcaatgcttttgcacgattcagataactgctgtcatcatgattctccacaacctcaacagacgcaatctttcctccgctgatcacaaccttaactttcaaagttcctccgaatccggttcctgttccataataggttccatctttatatgctgccgcatcctgtacgtcagccagtgacagtgtacttccctgtgccgctgcatttccggactgggattctcccgtctctccactgtctttttctcctgtcaatgcattcttcactgcactgataataccattagagctaaatgttgcgccagacaccacatccacatccagagtctgccctgcaatgatcctgtctatcactgcttttgcacggttaaagaatgctgcatcgtccgaagaacttaagatatcgattgccgtaatctgtttatctttgatcgttaccgcaacagtcacctcgccggcataaccggttcctgttcctttatagattccgtctgccagatcaaaagaaccttttgccttgctttctgtcttcttcgcttcatcggcatccgttgtctttgtctctttcgtctgcgcctgagcttcataaaccggtgcctgatagccgcttaatgacaccccgatacaggctgcaactacaatcgccgaggtagccggtgcaccctgttttatttttttgatcactttttctttatccatgtcttccacctctactttttcattatgtttaccttataatccgattgaaaatcatccgcaattccttctgatacatataattgatcgtcatccgtaagcaggatcacatcaaatttatcgctatacttcttccagaatttctctgctttctcttttcccatgataaaaagcgaagtagataatccatccgcaagtgttccatcatcacttacgattgtcaccgaagtcagtccgttctctgccggatagccggtagccggatcaataatatggtgatatttcttcccgtttttttcaaagtatctctcatatccacccgatgtaataaccgccttgtcctttgcctgcaggattccaagataatttccgtcttcatccggactttctaccgcaaccttccatgcacttccatctggttttgcaccaagaagctgtacatttcctccaagacttaccaggccgctcgtcacaccacactttttataaatctgcataatccttgaagatgtatatcccttcgcaatgcctccgaaatcaattttcacattcttgggcaacgtgattttttttgtctttttgtcatattggatcttcgatgcatctacattcttcagtaacgcactcagttcatcctccgcaggaatccggtaattctccgttgtaaatccccatgcatccatgaccgggtagatggatatgtcaaatactccttttgtctgtttatatattttttcagagcgttcatacaagtacgccgtgtcatccgaaacaaccgcttccccgttttgatttaatttgtacacttcactgttttcatttccggtagacaacatttcatccagccgtttgatctctgtctcagctttatctactgcttcagatgcatgctctccatatgctgttaccgtcatatacgtatccatcgcaaatatatcgcggctttgcttttcttcactggatttttcggaattttcacttttggaatcttcttttttatctgtctgcgtctgtgttttcttggcggatgccgtactgtttccacatccaacggttcccattgacaccgccgcacataaaatggctattacaatctttcttttcattctttatcctctatatctatagttactttcatctaccaatagttagtccgtgttgttttcagttctgttctcctaactcaataaatgtaccatatgtttttttctgcttcaattctttttttgatattgatatttattatcatttaattccactgttgattttccaccaaaaaagcgcaaaaaaaatatcctgaaatctttgattctttcaaaaatttcaggatatcagtggacctggcgggagttgaacccgcgtccgaaagcccatccattcgagcatctcccatcacagtcattatattaacattccctccatgcggcacctaatgacaggttccccactttagtagcttcataaattcttccatcccctcaaagctttgggaacgaagtgctccgcctgtttgaagccggtgacccgaacagcggatgatccggggccgactgcggcctaattaggctgcgtacgctaattctgtattgtctgcgtttatatttaagtggaacttttaacgtagtgtcccgctacggatggcttctccaacttccagacccccgtcgaaaccagtacaagccctgattgtaatgcttttctggtttgcagactgtctttctttaggtaaagcatattatacccccgtaagagttattttgtcaaggttcacaagacaatgaattttacgatctacaggacctgcccccggcagctccttacgaatgcatggcaacaaaaaaagcgggaaacaaatgcttcccgctttttgtactaacgattcttgatacgtcttctgataatctcagcgatcactgcaaatgctgctacagcagatgcgattgggattactggcatggtgtctccggttttggctgcatttccattattattcttgttgttctttccaacattcttatgattgccgcctttcggattctttccgtttgcattattattgctgacattctgtccattacccttattatcgttattcttattattatcttttcctgtatcttttccgtctgcttttttaagattacctattgcctgtttcagagcttctgtcttctgatcaatctctgcctgtgttacatcgtctttatttgcagcttctactgcttctttcagcgcttcctgaagtgcatcccagctttcttttgtataatcttctttgttcagtttctgtgctttttcaatgtattttctgatatcatctttcttcacttcttcctgaactttcttaagattctttattgctgtctgaagtgcctgaagtgcatcatcaacttctttctatcttactctttctgaacatgaaaatacccccatataggacttttatatttcattgtcctatatgagggtagcataccaaatgtgccgggggtttttgaacttataattcgaatacgattacttcgcagctttcaagtgaaagatgggattcggtattataattatgctgcttgtgctgattagaaagaagaacctgtttcaccggataatctaacggaagttcgacagattcttttccgaaattagcggcgaccagtatacgtgtatgttcatctttccggtaataggccatgacatcctctgtgtcctgataagcagggagaaatttaccataagtaaagacttctttgtatgttggagattttcgaagcgcaatcagtctccggtaataatttaatatagagtctggattttgatcctgatcagccatattgatctctttataattgtcatttactttcagccaaggagttcctgcggtaaatccggcattttcctgagcattccactgtacgggggttctggcattatcgcggcttagtttgctgcaagccttaagtgcttctttatcggtaagaccggcattccttgcagtgtgatattgatcaatggtattgatgtcattatattcttcgacactgttccataccgcattttgcataccgatttcctgtccctgatagatgaatgggatgccgcggagaaggatactgacggttccgagcattttggttccggcaggattctgcgcataatctggtaagaagcgggatacacctcttggttcatcatgattttcaatgatattggcttccagtccgcaagtttgcactctgagctgggagtcagagatggctttccgccattctttaaagtctacgggtggggcatcgtaccatccgtgttccccttcactgagtatgtgagcactgaagtcaaagattgtggaaaaatgaccattttcaccgatgaagtctgcaagttcgccttctttcatgttgaatacttcaccgacagtaaaggcatcgtatttctggaaagtatgtttctttaagtcctcgagaaaaatgccgacaccatctacgttttctaccatcctccagcagtttgcaagcccatccggtccgtccggatcaagatctgaaaaagtcaggtctttctttatattgatgatcgcgtcaatacggaatccggcgagacccttttcaagccaccagttcaccatttcataaagcttctttctgactaccggattctcccagttaagatccggctgctctttggcgaacatatgaaggtagtacagatccgttcccggaaccggctcccagcagcttccgccgaagtaagaacggtaattgcttggtggatttccattctttcccttgcggaaataaaaataatcggcatattcgccttccggatctgccagtgctttctggaaccattcgtgttgatcagaacagtggttgataaccagatccataatgatgtacatatctcttttctttgcttctgcaagcagttcttcgaattgttccattgtaccgaattcttctgcaattgcataataatcggaaatgtcgtatccctggtctacaaaaggggatttgtagattggagagagccagatgatatcaattcccagttcttttaaataatctaatttggagatgattccgccaagatcgccgattccgtctccgtttgtatccaaaaagctttttggataaatttgataggcaactttgtcatgccaccattttttcttcatgatttataaaacctgtctgttacggagaattgtcgtaacacctttcttttttaataatggttgcaagtatcaattatagaagtactgaatgagaatttcttgtaatatgatattgcaatatgatacaatacttgcattttgaagaattcagaaaaaatgttaccagacatgccggtaacattttttgtcaatataggaattataaacttgcttcgacgagaacagcaacagccattgtgtcatcttctgtaaatccctgtgcacaggtaagaattgtctgtacatagtcctttgaaagatcaagtttgtgagagatgacgtccatgtcatatccttcttgattcagagcagttacattctttacatccatacggatctgttccattgataaattagcatccatttcgtatatcctcctgtaaattcacgaaatttctttcttatattatattttcacttttattttctaagttctaatattttatcgagcagatggaaagcgacctcttctttgctcatcagttccagttcaaatacttcattttgcgtgatcatcgtaacaatatttgtatcggtttcaaatccggcaccttgttccttcagattgttggcaacgatcatatccagattctttttcataagttttttcttggaattttccagcatattttgtgtttccatagaaaaaccacataagaactgatggggttccttgtgctcgccgagatactttaagatgtcatcagtacgttccaatggaatagacatgacatctccctctttctttttgatcttttcatttgcaacattacaaggcctgtagtctgcaacggcagcagccttgattatgatgtccatgtcatgacttctggaagttacttcctcatacatatctttggctgatatgacaggaacggtgttaacaaaaagcggtgcatcaagagcggtacgcccggttaccagtgtgacatcagcgccgcggagcatgcaggcttttgcaatgctgtaacccattttaccggatgaatggtttgtgatataacggactggatcaatggcttcctgtgtcggtccggctgtgacaagtactttcataccggccatatccttttcatgtgcaatggttttgcatatgtactggaataaggtctcgggttccggcatctttccggctccgctgtcaccgcatgccaggtgtccgctggcaggagtgatcacctccatgccataatgcttcagcaattcaatattatcctgtgtgacaggattctcatacattgcggtattcatggctggtgcaatgatctttggtgcacggcttgcaagaacggtagttgtcagcatatcatcggcgagaccatgcgcaagctttgccatgacattagcagttgccggtgcgatcatgacaatgtctgcaagttgggcaagtgcaacgtgctctactttaaattcaaaatttcggtcaaatgtatctgtgatacatttatgtcctgtcagagtctcaaaagtaattggattgataaaattggtggcgttcttagtcatgatgacatgaacgtcagcgcctgcttttaccagaagacttgtaagtgttgcaattttataagaagcaatacctccggtcacgccaagcaggacatgttttccttttaacataagtattcatcctcatttcaatgttcaaataaaataatacaattataatcactatatcgctttttcttcattcttgcaagcaatagtaataaaaatacatagaacccgcaggaaaagacgaatcatagtaataactgtgaaaaataagcagattgtatggatttttatacttgtttggcagttcccggaatgctataatcagactcgtaattgtattgtatctcggtcaccgggaatgataacaaggaggaaaattaaatatgaagacaaagaaacatgacactagttggatggtcagtgttgcacttatggcagcgatcgtaatcgttctggcgaacacaccgcttggaatgatacagcttccgatcattaaggcaacaactgtacatattccggtaattcttggagcaattttgttaggacctgcagcaggcgcaatcctgggcggtgtatttggcatctgttcactgatcagtaacacgatggcaccgacacttttatcatttgcgttctcgccgtttatgagtactacaggaataccaggggcaataaaagcagtctggatttcagtaggatgcaggatattaattggtgtggcagcaggatggctttggattcttttttcaaaactgaaagtaaatagtatcatcgcacttccaatcgtgggatttgcaggagcaatggttaatactattactgtaatgggaagtatctatattctttttgcaaaacagtatgcagaagcaaaagatgtggcagtcagtgccgtatggggactggtaatgggaactgttacagcatccggaattccagaggcgattgcagcagcaattttggttctggcaatcggaaaagtattacttggtgtatttcgaaaaatgaatattggaaatgttgcgaaagcaaatgtatagaggaaagaagacctcccggctcaagaaagagagccgggaggtcttcttttgctatgtatttataagaaagaagctgccagtgactggttctgtagatacgaaaaaacagaaattttgcaaaaaaataaaaaaattgaaaaattctgttgacagatgtatgattaatatggtataaataataagtactcagcgatgatgtacaacaaaacagaatataggggattggtcaagtggtatgataggggtctccaaaacctttggcgggagttcgattctctcatcccctgctcctatgaaagagcggaaaagccttaatttataaggttttccgctctttttgcgttataaaaataaattttagatatcgaccataatataaatcgacatgcgttcgaaagaagctgtcggtgacgtgctctgggtaaatacttcggctttgcaatcggataaaaataatgttataatattcatagtgatttgagctgaggatatgacgaatctatcgtaaggaggacatggaggatgaaagaaaagataatacaaggtggaattgtaaatggagagaagatgctggtatgtccaacttgggaagatgaatttcaaaaagcaattcacaagaccggaggctgcttccggattagcatggattattcggctgtagatgtttcctggtggaaagaactggaaaagattgccggaaagtatggctatacattggattccgaatcgctggaaatcattcaggaatatgtacagaagtataaaaagtatgaaaatcatttctgggaatatggaaagaagattattacattcgaacagttcagcaggatgttgagtaaaaaagccggtatacagccgaaagaggcaaaggaatatgttgttgcaaatcttcagaatctggaacataaggagattttggaggcgttgttattttcactgcagcttatcaagtctgagaagggactggagggaactcagtggacaaagccaacctgcgattttataaaaaaagaatttgaaaagatgattgtgaacgaggaatattaagacattaaaaagtggggagtcgggaatactggttctccacttgttttatatcgccatgtgttcgtaagaaggaggaataataaaaagatggaattatgggatatttacgatgagaacaaggaacgtacaggacgtacaatgaagcataatgactggaatatgaagccgggggaattccacctgacggttcttggagtattaatgagaccggatggaaaatatctgatcacccgaagaagaatggataaagaatgggcagcaggatggtgggaagtgcctggaggcggtgtacgcgccggagaagattcgaaagatgcagtgatccgtgagattaaagaagagacgggaattgatgtaacgaatgcagaaggaggatatgcattttcttataagagagtgaatccggaagagaaaaataattattttgtggatatttataaatttgtgctggagtttgatgaatcagatgtaaagacacaggaagaagaagtgtctggctttgcgattgcggatttgaatgagattaagagatatgctgatgaaggaatttttcttcattatgacagtatcagacaggcgttcgaagaataattatatggagagtaaggggctgactgtatgaatgatgaggaccggattctggaagacatcaaagaaatactgaaagaactggatgaacaggggcgtatgaaatatacacagagatatatgcagcacagtgatatatccgtgtataagcattgtatcagtgtagcgtatacaagtgtggagcttgcagaaagattttccctaaatgtaaatagaaaagagctgatcagaggtgcgctcttgcatgattattttttgtatgactggcatgaaaaaaatgcgggacacagatttcacggttttatccatgcaggacgtgcgcttcaaaatgcaaaaaatgattttgaactgaccagacgggaagaaaacattatttcgcggcatatgtttcctcttaatatcgttccaccaatgtgtaaagaagcctggctggtatgtctggcagataagatctgtgcatcgaaagagaccatcgtcagaagaattcatataagaagatataagaaataagttgacttactatatatcctactactataatagggattgcgctgtgaaacggtgcgaagagtgaatgataagtcaagaatacggacagaaaaaaatataaagtatgagtggaggaaaagctatgttaaatcagttttccagaacgcagcttcttttaggagctgataatatggacagactttcgaatgcaaaggttgcagtttttggaatcggcggtgttggtggatatgttgtagaagcacttgcaagaagtggtgtcggttcgtttgtattggtagatgatgacaaagtatgtctgacgaatattaaccgtcagattattgcaacaaggaagacggttggaaaatataaagtagatgtgatgaaagaaagaatccttgagattaatccggacgcagatgtagaagtaaggaaatgcttttatcttcctgagaatgcacatgaattcccgtttgaagaatactcttacgtggtagatgcagtagatacggtaacggcaaagattgagatcattatgcgtgcaaaagccgcagaaattccggttatcagttgtatgggagccggtaataaactggatgcatcggcatttcaggtggcagatatctataagacgaagatgtgtccgcttgcaaaggttatgcgaagagaattaaaggcacgtggcgtaaagaaactgaaagttgtatattcagaagaaaagccggtacgtccgctggaagatatgagtatcagttgcagacagcactgtgtatgtcctccgggaacggacagaaaatgtaccgaaagaagagacatcccgggaagcattgcatttgttccgtcggttgcaggactgattcttgcaggggaagtggtaaaggatctgacaattaaccaatatggacgcggggacgaataaaaacggatatcttttgacttttttcgcaaatgctttataatagagaaggtaatgttctatttgtagattgaggaggttatcaatatgaaaaaaaatagaagaaacaactcaagaccggcagcaatcgcaactgcaaaagacacaactaaggcaatcgagacaagagcaggtgtattgaaagaggcagaagacgtgaagaaagaagcaaagacaagcttttatcttcagtatatgggtaaagagatcagcacagaagagattacaaaaaaagtgcatgaagtatggacaaaagagtatggtaagagtgtggaagaaatcaaaactctgaatgtatatctgaaaccagaagaagctgcagcttattatgtaataaatgaagagacaacaggcaaagttactatttagtgatttgccggattgactgtgaacaaaaataagaggagcgtttccgtgtgtatggaaatgctcctcttatttttgtaccactatattgcaaaaaagaacacaggcagtcggttgaaaagaagaatttagccgcaataacgggtaatatcttcttcaagatgatcaatctgttccgtgagattgtgaagctgttcatcagaaagagattccaaaatcgctttcatatctgcagcaattttagaaggattatacggtacttctaatgcgaaatcactgtaagcacggagcttttgaaaataagtatttgtttcaggttcttcttttccggcgcggcacatctgatacatggtgacacaatcagtggcagcctggtcggtgcattccttgcagatccattttccaagataataataattgttcccgatctgataaagaaagcccggaagctttaagattcgttctgataacatagtgaagtcctccttttcttatctattagtatcccgttgtttgatacaaaagtcaagtgggattctggtattaatatcattataaaaagtaaaacagattctttgcaaatcaccggaatgtatcgtataataaacagcagtataaaaaatagtgaaggaaagaattcatgtaaatatatttaggacatgtatatatggagagtgtgaatgatatgaggattaagaatggtttaatgctgcttcttacagcttttatctggggaacagcatttgtagcacagagtgtggggatggattatctggaaccgtttacatttaatggagtaagaagcctgattggaggagcggcacttttgccatgtatctggatcttgcagaaattaaatggaagatcgaaagatacaggcacgaaaaaggatctgctcacgggcggattggcctgtggtgtgttactgtttgcggcaagcagtcttcagcagatcggtattaaatatacgacagcgggaaaggccggatttattaccgctttttatatcgtgatcgttccggtgatgggagtttttcttcataaaaagataggctggaagatatggctggcagtagtgttggcggttgcgggactttattttctgtgtattacagagtcgttttctgttggcaaaggagatattctggtatttttatgcgcacttgtatttgcggtacatatcctggtgatcgatcattttgcacctaaggtagatggtgtgaagatgtcgtgtatacaattctttgtctgcggaattttgtccgtgccatttatgtttgcattggagacaccaaagataacagctgtaatgactgcatggatgccaattttatatgccggggtattatcttgtggagttgcttatacactacagatactgggacagaaaaatgtaaatccggcggtggcatcactgcttttaagtctggaatcgtgtttttctgtactggccggctggattgtgctgggagaaagactgtcaataagggaaatgtcgggatgtatattgatgtttgctgcaattatcctggcacaggttcctgaaaagaaaaagagataaaagggagaaaatcagatgcgttttgtaattcaaagagtaacagaaagtagtgtaaaagtagatggtgaagtgataggaaagatcgggaaaggattcatggtcctgatcggagttgcggattcggatacaaaagacacagcagataagatgttaaagaagatgttaggacttcgcatttttgaagatgagaatggaaagacgaatctttcgctggatcaggtaggaggagagttgcttttgatttctcagtttactctgtatgcgaactgtaagaagggaaaccggccaagttttatagaagcagggaaaccggatatggcggaggagatgtatgaatatatcatcagtaggtgtaaggaacaagtaacggtagttgaacgggggaaatttggcgcagatatgaaagtaagtcttgtaaatgacggtccgtttaccattgtacttgattcagaaaagttataatcaaagggcagaagaatcttcagggacaaaagttgttccggagattctttttttagttatataactaattaaatatttgttaaaatgacggaatgattattaaataaatataaaaacattgacattactggtgaaaatgactaatataatcgttagacatctaattaattgggagaggagaaataatatgcacaaagagatggaatcatctgtgttcttttcgatattccaattgatgcagttcatgaaatatcagggaatgaaaagaatggaagaactggacatcaagccgagtcaggcaggaatattattttcactgaaatgctggggagaacagtcacagagacagctcgcacaaagagttgggattactccaccgtctatgacagtcgcacttcgcaagatggaagaaaaaggttatgtaagccgtaagacggatgagaaggatcagaggattacaaggatacagcttgctccgaaaggggaagaatgtatagatggaatacgccgtgtccttacagagatggaagaaataatctatcaggggatatcaagagaagaggtacttctgatgaagcgtctgcttgcagagatgaagaataatcttctggagtctaaggatttcaaaggagtggatatgcagaccattatggaaaaaacacatccttctatgaaacatatgtaggaattgttttgatataaataggacagaaaggaaaggcataaaagatatgggaaaattattgaaatttctgaaaccgtatgcaggtgcggttgtagcgattatctgtatacttgtcgtacaggcatattgtgacctgtcattgccgacatatacctcggatattgtgaatgtcggtatccagcagggggggatcgatgagaccgtaccggatacgatttctaaaaaagatctgaaccatttgttacttctggttccgtcggataagcaggagcttgtaaagaatgcttatacgaaatcaacgaagaaatacgactataagggaaccgttatggaattaaaatcttctgtaaaagaagatgataaaaagatggagaagctctccgatatcctcggaaagccgatgcttctggcggcaggatttgactccggcagtgacatgacacaaagaatcgaagaccagatgcgtacaaatatgaagaagcaggttgaagcaaaacaggctgaggccaaggcgcagatgtcagaagttccggattttgacaagatggatatctatgatatgttgaacttcatgggagcagaaggcagagacgcgctgatcaaacagatgaataaaaagatgaattccatgcaggattcaatcattgaacaggcagcctccacctatatcaaagatgcttacacacatgtaggaatcgataccgatcagatcgaaaccagttatatcttacacacaggggccaagatgctggcacttgcattccttggaatggcggcaagtattatggtcggactattagcatctcgtgtcggagccggtgtcggacgcggacttcgtgagaatgtattccgtaaggttgtcggattttccaatgcagagtttgacaaattctctacggcatcactgatcacaagaagtacgaatgatatccagcagatccagctgttgattgtgatgatcctccgaatggttctgtatgcaccaattatggcaatcggaggaatctggaaggtcttccacacgaatgtcagcatgtcatggatcatcggacttgcggttgcaatcattgtagtcatcgtaggatttttattctttgtagttatgccgaagttcaaactgatccagaatcaggtcgacagactgaatcttgtcagtcgtgaaatcttaacaggactttcggttatccgtgcattcggcacacaaaagcatgaggaagagcggtttgatgatgcgaacaaagcactgacgaagacaaaccttttcgtaaaccgtgcgatgacgtttatgatgccgcttatgatgttcgtaatgaacagtattacgctgctgatcgtatgggtaggcggtcacagtatcaacgacggtgtaatgcaggttggagatatgatggcgtttatccagtatacaatgcagatcatcatggcattcttaatgatctgtatgatttcggttatgcttccaagagcagcagtatctgcaagccgtattgatgaagtactgacaagtgagacaatgattcatgatccgaagcagccgtcacgtattccggaagaaggaaaaggaaaggtcgtattcgatcatgtatccttccgttatccgggagcagaagaagatgtactgcatgatatttcctttacggcagagccgggaaagaccacggcatttatcggaagtaccggatgtggtaagtctacgctggtaaacctgatcccgagattttatgatgttacagatggtaagatcacgatcgacggaaaagatgtcagagatgtatcacagcatgaactgcgtgaaaaactgggatatgtaccgcagaaagctgtactgttctccggtgatattgcttcgaatattttatatggcaacccggatggaagtgaagctgagatgattgaagcagcaacaatcgcacaggcaacagaatttattgatcagaagaagaaaaaatataagagcccgatctcacagggaggagccaatgtatctggtggtcagaagcagagactttcgattgcaagagcaattgcaaaacatccggatgtatatatattcgatgatagtttttcggcactggattataagacagatgcaacactccgtgcagagctgaaggagaagacagcggaaagtactgttatgatcgttgcgcagaggatcagtacgatccttcatgcagatcagatcattgtactggaagatggtcagatcgtcggaaagggtacacataaagaattactgaagaactgcgaagcatattatcagattgcttcttcacagttatcagaaaaagaattagaagaagatcttaaggaggtggaataatatgccaagaggtagaggacgtggaccacagatgtcaaatgaaaaggcaaaagattttaaaggcacaatgaaaaagctgatggcatatttgagcgcatataagattggaatattctttgtaatcgtatttgctatcggaagtacgatattcaatattgtaggaccgaagattcttggaaaggcaacgactgagatatttaaaggactggtcagaaaagtatccggaggatccggaatagattttgacaagatcgcgcatatcgtactgacgctgttatgcctgtatctgacaagtgcggtattctcctttgtacaggggtacattatgacgggtgtgtcacagaagctgacgtaccgtctgagaaaagaaatctctgagaagatcaaccgtctgccgatgaactattttgataagcagacacatggtgaagtattatcgcgtattaccaacgatgtagataccttaagtcagagtctgaaccagagtgcgacgcaggtgatcacatcgacgacaacgatcatcggtgtattgatcatgatgctcagtatcagcccgctgatgaccgtggtagcactcctgatccttccggtttcaatgggactgatctcagtgatcgtgaaacgttcacagaaatatttcatgagtcagcaggaatatctgggtcatgtaaacggacaggtggaagaaatctatggcggtcataatatcatcaaagcgtttaataaagaagaggatgtaattgcaacattcaagcgtgacaatgatattctgtatacatcggcatggaaatcgcagttcctgtcaggaatgatgatgccgatcatgcagttcgtcggaaatctcggatatgtcggtgaggttatcctcggcggttaccttgcgatgaaaggtacgatccaggttggagatatccagtcatttattcagtacgtaagaagttttacgatgccgatccagcaggttgcacaggtggccaatatgttacagtctacagcggcagcttccgagcgtgtgtttgaattccttgaggagaaggaagaagaccagacggtagagaatccggtatgtatcgataaactggaaggaagcgtaagcttcgaccatgtacatttcggatataatccggatcacacaatcatcaatgacttcagtgtggatgtaaaaccaggacagaaggttgcaatcgtaggaccgaccggtgccggaaagacgacgatgatcaaattattaatgcgtttctatgatgttggaagtggttcgatcaaagtagatggacatgatgtccgcgactttaaccgtgatgacttaagaaaaatgttcggaatggtattacaggatacctggctgttcaagggaagcatcgaagataatatccgttatggacgactggatgcaacgcatgaagaggttgtggaggccgcaaaggcagcacgtgcacaccgctttataaagacgcttccgggtggttatcagatggagttaaatgaagaagcaagtaacgtatcacagggacagaaacagctccttacgatcgcaagagccatgctggcagatccgaagattctgattcttgatgaggcgacaagttcggtagatacaagaaccgagatccagatccagaaggcgatggatcagctgatgaaaggaagaacaagtttcgtaattgcacaccggctgtctacgattcgtgatgcggatgtgatccttgttatgaaagacggggatattgtagagcagggaaatcatgaggaattattagcacaaaatggattctatgcagaactgtataattcacaatttgagagaagtgcataaggatatttacagatagagaagtccatgttaaaagaaataaggcgctgcccgaagaatatcgggtgcgccttttgttgtgtgcattgacatatgcggaaggggattcatttgatgcgctgccttttgttattttacgtatatagagggtgtaaaataatgaaatattattattgtgtagccattcttacgtaaaatatataagtaaaataagaaaggagaggcatgaatcgttttaagaaatgctatgtaggaaaagctgccacttgacagttttcttacaaaatccgatgaatatttaaagtaattaaattatatcactcgcggtaagaaaagtatagtataataaacgaataaaaagaaacgcaacaaaatgttgcatgccggaacaaaagaaatgtcccggcgtgcattttagataccaaagtatgcaagaaaagttgccagtggcaagttctctgtatcgcgtgcgttcgatactaatgtgtggaaattccggcaagaatgttttttacatgtgagatttcctgatcggtagctttggcggcaggaacataataacttttttcgcgggcaatctgataaagtttttcctgggacatttcacagtcattacgtatctgtttcagtttctgcttcaattctttgttttccgtctgggaaatcatttctccgtaacgtacaagttctccgttgacaccggcaagggcatcgcttaccatcgttttttcatccagcatagatagttcctcctataaaaatttcatcagatcctgtcggttcttcatagcactgtctgcagcatcctgaaacagcttgcggatttcaggatctttggcttctgaggcatagtcctgcattttgcactggctggtttcaaatccgccaattaaatgacgcaggttctgaagatcaagtattgaaatttctgacatagtacacgttcctcctttttattattatatatctgtgaagaactgtcagtggcaggttctttgcagcgccgggcgtttgaaagaagctgcgagcggcaagttctgtagatatgacatatacagtatgtgcaatagacgcagattatatatatggaaatgtatagaaaaaactatcagttaaagcgacaaaaactatggaaaatgtcgtatactgataacagatgatttacataatgtgatttgtgtaataaaacgaataaacaaaaggggataaaagcaacatgagaatgattgatatgcactgtgatactttgtggaaattgatcgatttggatggccagggagatttgatgaagaatgattgccatatcagtattccatctatgaaaaaagcgggaaccgtcgtgcagctttttgcctgttttacgaaggcggctgattataagaagaaaggaggatatgatgcggcattcgttcatgtacaggatatggtgcgatatttaaggcagcagcaggagaggtacagtgaagatctggcactggcatattcgtggaatgatgtagacaggaatgatttcgcaggacggatctctgcgattatgactgtggaagaagggggaatcttaaacggtcatatggagcggctggaagagctgtatcaacatgggatcaggcttatgacaccggtatggaattatgaaaactgcatcggatatccaaacagcagaaagaaatctgtaatgtggaaggggttaaaaccttttggaaaagaagtgatagaaagaatgggagaactgggaatgatcatagatgtatcccatgcatcggatggaacattccgggatataatggcaatcgcaaaaggaacggtgattgcgtctcattctaattgcagggagattgcaaagcatccgagaaatctgacagatgagatgatctggcagcttgcagatgcaggtggtattgcgggacttaatctgtatggcccgttccttggaagagagaaagaatccaggattgaagatatgacagctcatatattacatatgttaaataaagggggcagtgatttcccggcaattggaactgattttgacggtttcggggagatggaagtaatggaaattggacatccggatgagatggagaagctgtgggaaatattgaagcaaaaaggagtaaaggagtcacagcttgataagatctggtatcggaatgcgatgagagttttgaaaagtatttaaatataaagcagggacggttatccgcccctgctttattcaatcgcatagtatgtatttatttttgatttttatttacattctgcagcttcattgcacgaactttcagaggaagtccgaacaggttgatgaatccgcttgcatcatgatgatcatagagatcacctgttgtaaagcttgcaagtgattcactgtacagagaatatggagaagttgttcctgcttttgtgatggttcctttgtaaagtttgaatttgacttcaccagttacatattcctgtgtgctttcaacgaaagcctggattgcctcacgaagcggagtgaaccattttccttcgtatacgagctgagcaagcttgtcagacatttctttctttacttctgctgtagcacggtcaaggatcagttcctctaactgctggtgtgcagcatacaggattgttccaccaggtgtctcatatacaccacgtgatttcataccaacaacacggttttcaacaatgtcaatgataccgataccatgttttccgccaagttcattcaatttgcgaatgatatcagataccttcatctcttcgccgttgatactctttggaatacccttttcaaatgtcattgtaacatattcggctttgtccggagctttttccggagttgttgacattacaagaaggtcatcgtagtttggctcgttggaaggatcctcaagttccagaccttcgtggctgatatgccataagttacggtcacggctgtagctgtgttttgcatcgaatggaaggtcgattccgtgtgctttacagtaatcaatctcgtcttcacgtgactgcatagtccagagatctgtcattctccaaggagcgatgatcttgatatccggagcaagtgctgtgataccaagttcaaaacggatctggtcgttacctttaccggtagcaccatggcagattgcaacggcattttctttacgtgcaatctctaccagacgttttgcaattgcaggacgagccatagaagttcccagaagatattcatcttcgtatacggcatgtgcctgaacgcaaggtacgatgtaattgtcggcaaaatcatctacgatatcttcaatatataatttggctgcaccggaaagtttggctctttcttccagtccatctagttcttcgccctgtccgcagtcgatacagcagcagataacatcatagttaaatgtttccttcagccatgggataattgctgtggtgtcaagaccacctgagtacgctaatacaactttttctttcatcttatatatcctcctacatgaaatatagttttatcaatcgatttaaaataatcttctcgtatgcagtcttaaaagtcaagtctttcttttataaagaacatttttgactgcaaggaatactatacacctgattttataattatgcaagaaaaaatgataaaaaagtgaaaataattaaaaaatatgcagaaacatgcataaaataaagaagaagtgtatgatggatgaatatttgaatataataaatggaaaattaaaaggggattagataagtttacataattcgattagaaaacataattaagaaatgatgaaagatcttacgaaaaatgcttgacgaatccatgacgacaacgtagaatatatccggcaatttgtgcaaaaaataaattaagaaaatatcagcgcaagaaaaaatttcgaaataatatttttatatataaaaggagaaagatacgtatgaattatgatgtaattattattggagcaggtcccggaggaatctttgcggcatatgagctgatgaaaaagaaaccggaatgtaagattgctgtatttgaagaaggctatccgcttgaaaagagaaaatgtccaattgacggagataagatcaagagctgtatcaattgtaagcgctgctcgatcatgtgcggatttggaggagccggagcattttcggatggaaaatacaacattacgaatgacttcggtggaactctgttcgagtatatcggaaagaaacaggcagtagaactgatgaaatatgtggatgagatcaacatggagaacggtggagaaggaacaaagctctattctacggcaggaaccaaattcaaaaaactctgtctgcagaataagttaaatcttctggatgcatcggttcgtcatcttggaacagatatcaactatgtggtacttcagaatctgtataatcagatgaaagaccatatggatttctattttgatacaccggtagacacaattgaaaagattgaaaatggctacaaagttgtatgtgaaaaaggcagttatgaatgtgaaaaatgtattgtatctgtaggacgaagcggaagtaaatggatggaaaaggtatgtaaggatctggaaatccctacaaaatccaaccgtgtagatatcggtgttcgagtagagcttccggctgttatattctcacatctgacagataaactttacgaaagcaaaatcgtatatcgaacagaaaaatttgaagataatgtacgtacattctgtatgaatccaaacggaattgttgtaaatgaaaatactaacggaatcattacggtaaatggacacagctatgaaggaaacgagaaaaagacagataatacaaactttgcccttctggttgcaaagcatttctcagagccgttcaaagacagtaacggatatggagaaagtatcgcaagactttccaatatgcttggcggaggtgttatcgtacagcgttttggtgatctggtacgtggaagaagaagtacagagaaacgtatcgaagagggcctggtaacaccgactttatcagcaacaccaggagatttaagtcttgtacttccaaaacgaatcctggatggtattgttgagatgatctatgcgctggataaagttgcaccgggaacagctaatgatgatacacttctgtatggtgtggaggttaaattctacaacatggaagtagatattgatgaaaatctggaaagttgtcataaaggactgtatgtgatcggagatggaagtggtgtgacacattcactttcgcatgcatctgcaagtggggtgtatgtagcaagacatattattgaagaagcttagaacaagttcggttgtgaactggctgacatccgaaacggaaggacggcaagagctgacagaaaaaacagtataaagcaagaatagtataagaaattctgtgttttattcagttgatagctgagtaggacacggaatttttttgttgcaatgcattcgtaaggaaatttgtaaaaaaataataaaaatcttgacttgtgtagattgccgatataatatatagacgaacgatatagtatgtagataatctacatactggattataaaaaggaggtaagagaagatggcagtagacaaaagtctggtatcaggaagtactacgatgctggtgttaaaattattagaagaaaaggacatgtacggatatgaaatgatcgataccctccggggaaaatcaaagaatgtatttgagttaaaagcaggaactttgtatccgcttttgcatggtctggaagaaaaaggattcgtagagtcttatgagaaagaagcagtcggaaagatccgaaaatattatcatattacaagatctggaaaaaaagaattaaaaaagaagtcagaagaatggaaagagtattcaaaagcggttctggatgtgatgggtggtgtgtgctttggataaaaagaaatatatacagacggtaacagaacagatccggtgtaagcgggcacttccgctggtaacaaaagaactggaaggacacatcgaagatcagaaaagtgattatatgaaagcaggaatgaatgtcgaagaagcagaagaagcggcagttctggaaatgggtgatccggtagaggttggtgttgagatggaccgtatccatcgaccgaagatggcctggaagatgatcggactgatcgcgattttgaatctggcaggaattgtactaatgtatctcataagaacaagcatcctggcagatgcaggaaataatccgggagatgtagaatggatcgcatcgggaattggtggtaatatcaactatctgaaaagtgttatgtggacgatcattggtctggcttgtatgataggaatctgttattttgattacagcagaataggaaagtatggcaagttgttaaccggaggctggatcgtggttatgggactgagcctgttcatgggtgcagtatatatcaatggagctgcttacgggatcctgtttttatttggccgggtattaccgctgcgtccatttttatatctgattgttcctgcatatgcggcaacattgtatagcatgcgaagaaaaaaatctggttatttcggtgttgtaaaggcaatactgtggcagatactgccggtgtggatcatcttacgcattccgaatctgtccatggcaatcagcgtagaagttacatttatgattctgttatcaattgcagtttggaaagaatggtttgaggtgaatagaaaaagaacattgattacactgtggagtctggtaattctgctcccggcagcaggaattgggttgttcgtaaaactggactatgtagcaaattatcagatggcaagactatccgcttttatccatccggaaagcaatgacggaaccttagggggaatgataagaaatatgatctccggagcacatcttgccggacgtggagattgtgaaaaaataaagttctttaacagagattatatgctgacctttattatacattattatggaatatttgcagcggttctgataattgctattgtaggaggcattctgatatggttcctgcaaaagacaggacaccagaaaaatcaactcggcatgatcatgggaaccggatgtgtggtggtcctgcttattcagttcattggatatgtattagaaaatcttggacattttccactttcaaataattattgtctgtttctgacgaccgggggaagtgggatgatgatcagttatattatgtttggaatattacttagtatttatcggtatcagaatgtgttggtggagccggaggtgaagaagaaggagatttctgtttaatctattaagcggctgatacccggcctgaagtgtatctatataatctgtcgctggcagtttctcatggacctaggtaagccacgatgatgaactaaacagaaatataattaaaaaggacttgcataatatacattatagatgtatacttatgcaagttcctcttttaccacacaaaagtaaatagatggatttttgaaaaaacaatccgaccaaactagacaattacaggaaatgggggtactataaaacgtacgataatttataaaaattcaatatcggaaagggtgttatatagatgattaaagttggaattattggagcaactggatatgccgggggagaactggtaagaattctcgccggacataaagatgctgagattgtatggtacggttccagaagctacatagataagaaatatgcagatgtatatcagaatatgttccagatcgtagatgcgaaatgtctggatgataacatggaagaactggcaaagcaggcagacgtgatctttactgcaacgccacagggattctgcgcatcgatgatgaatgacaagattttaagtgagacaaagatcatcgacttaagtgcagactttcgtatcaaagacgttgctacttatgaaaaatggtatggaattgaacataagagcccacagtatatcgaagaagcggtatacggactttgcgagatcaacagagaagatgtgaagaaagcaagactggtagccaatcctggatgctatacaacctgttcgatcctgactgcttatccgctggcaaaagaagggatcattgatatgaataccctgatcgtggatgccaagtccggaacttccggagcaggacgtggtgcaaaagtgccgaaccttttctgtgaagtgaatgagaatatgaaagcgtacggtgttgcaagccacagacatacacctgagatcgaggaacaactcggatatgcatcaggagaaaaagtactgatcaacttcacgccacatctggttccgatgaacagaggaattctggcgacggaatatgcaacattgaaaaaagatgtgacctgcgaagaagtcaaagcaatctatgataaatattataaagatgagaaattcgtccgtgttctggaaaaggatgtatgcccggagacaaaatgggtagaaggaagtaattatgtagacatcaacttcaagatcgatccaagaaccaaccgtatcatcatgatgggagccattgacaacctggtaaaaggtgcggcaggacaggcagtacagaatatgaacctgatgttcggacttccggagacagaaggtctggaactggtgccaatgttcccataaattttcggaaaaaggatgcagatgagatgaaacgtaagggagcattatcctaagttcatctgaaaatacaggcagaggagaaaaataatacatatgaatataagagtaatgacaattgaagatttcgaccaggtgcacgcactttggatgagcatcaagggattcggaatacgaagtgtggatgattcgaaagagggcgtagaacgctttttaaaaagaaatcctacgacaagcgtagttgccgaagaagacggaaaaatcgtcggagcgattctctgcgggcatgatggaagacgaggctgtctgtatcatgtgtgtgtagatgtaaatcacaggatgaagggaatcgggaaggctatggtagtatttaccatggaagcgctgaaaaaagaaggcattaacaaagtatctctgatcgcatttacacagaacgatatcggcaatgcattctggaaagaaatcggatggacaaaaagagaagatctgaattattatgattttacattgaatgaagcaaatatcacggcgtttatccagtaagcagattaggaagataaaataaaagagcatataaaagaaccggcagataaaacgagaaaattgagactaatgaacagccggtaatataaaatgagagaattaagaaaggtggaagaacagatgaaacaggtaaaaggcggagtaaccgcagcaaaaggatttgaagcagcaagtacagcagcaggaattaagtataaagacagaacggatatggcactggtatacagccaggttccatgcgtggcagcaggaacatttacaacaaatgttgtaaaagcagcaccggtcaaatgggatcagcaggttgtaaaaagcggggcaaaagcacaggcagtcgttgtaaactcaggaatcgctaatgcctgcaccggagcagaaggatttggatactgtaaagatacagcagatgcagcagcgaaagcactgaacatttccgcagacggtgttctcatcggttctaccggagttatcggaaaacagattccgatcgacaaactgacagctggaatcgaagcgctggcaggaaagaagaatgatacacttgaaaatggaacagaagcagctaaagcaattatgacaaccgatacatttccgaaggaactggctgttacaatcgaagtcggcggcaagacagtaactatcggaggtatggcaaaaggatccggaatgatccatccgaatatgtgtacgatgcttgcatttattacaacagatgcagtgatcacaaaggatgcacttcagaaagcattaagcgaagatgtcggagatacctacaacatgatttctgtagacggagatacttctacgaatgattccgttgtattgctggcaaatggtctggcagagaacccggagatcacatatggaacagaagattataaaaattttgcagaagcattacatacgatcaacgaatatcttgcaaagaagattgcaggagacggagagggtgcaaccgcattattcgaagtcaaggcagttggctgtgagagcgtagaacaggcaaagacacttgcaaaatctatcgtatgctctaatcttacaaagacagcgattgcaggacatgatgcaaactggggaagaattctctgcgcaatgggatattccggagcacagttcgatcctgaaaaagttgacctgttctttgagagtaaagccggaaagatccagatcattgaaaatggtacggctgtagattacagcgaagcagaggcaactaaaattctgtctgagccggaagttacagcaattgcagatgtgaagatgggagataagacagcaacagcatggggatgtgacctgactcacggatatattgagattaatgcagattacagaagctaattcagaatgcaaagattaaagtatacagatgcagcaaacagacagaaatgaaaagacaggagatcaaaagatggaaaaagcaatgcagaaatacctggacaaagcagaagtactgattgaagcccttccatatatccagagatttaaccgtaaggttattgtagtaaaatatggtggaagtgccatggtagacgaagagttaaaagcaagagtcattcaggatgtaacccttctcaaattagttggattcaaaccgatcatcgttcatggcggtggcaaggagatcagcaaatgggttggaaaagtcggcatggaaccacattttatcaatggacttcgtgtgacggatgcagagacaatggaactcgcagagatggttcttggtaaagttaacaaaagtcttgttcagttagtggaacagctcggtgtaagagccattggtatcagtggaaaagacggcggccttctgaaagtggataagaaactggcagacggtgaagatatcggatttgtcggcgatgtcaaagaagtgaatgcggatatcatctatgatcttctggaaaaagatttccttccgattattgcaccgatcggtctggatgatgaatacaatacttataacatcaatgcggatgatgcggcatgtgcaatcgcgaaagcgatcaatgcagagaaacttgcattcttaacagatattgaaggtgtatacaaagatccgaatgacccgtctacattgatttcagagttaaatgtttccgaagggaagaaactgatggaggaaggatatatcggtggaggtatgcttccgaagatccagaactgtattgatgcaatcgaaaacggtgtatccagagtacatattctggatggaagaattccacactgcctgcttcttgaaatctttacgaataagggaatcggaacagcaatcaaaaatgatgtagaagaaagatattatcacggagaataagctatgaatgaatatatgaatgaatatatgaaagaaacaaacgaagctttgttacatacttataaccagttcccggttgtgttagatcacggtgaaggtgcatatctgtatgatacagaaggaaagaaatatctggattttgcagccggatatgcggtgtcttcgttgggatacggcaatcaggagttgaatggagcattaaaagcacagattgacaagctttttcacacatctaatttgtattacaatactgtatgtggaaaagcagcagaagatctgaaacgtattaccggaatggatcggattttctttaccaacagtggcggagaagcggtagaaggaactttaaaagcagcaagaaaatatgcatacaaaaaaggaaccggtcgttatgaattcattgctatgaaggaatcttttcatggaagaagctttggagcgttatcggtaacaggtcatgatccatatcgtgcaccgtttgaaccacttgtaccgggagtgtcatttgcagaatataatgatctggacagtgtaaaagcactggtaacagacaaaacatgtgcgattatcctggagccgcttcaaggagaaggcggcatcaatctggctacagaggaatttatgaaagggatccgcaaactttgcgatgaagaaggaattctgatgatttgtgacgaagtgcagtgtggtatgggaagaaccggttccatgttcacatggcagtcttatggtatcagacctgatattatgtctatggcaaaagcaatcggaaacggaattccggtaggagcgtttgcaatgacagaagagatcgcgaagtattcactggagccaggtgatcacggaactacttacggcggaaatcctctggcatgtacagctgtaagtaagacgatcgagatttttgaaaaaaagaatcttgtggcacatgtgcaggaactcggtgcatatctgacagaaaaactagaagaactgaagtcagaatgtgactgcgtaaaggccgttaaaggaaaaggactgatgcagggaatacaggtgacaaagccattatccgagattacgaaagaggccttaaaagaaggacttctgatcatcggagccggaaacgatatgatccgttttgtaccacctcttattattgaaaaagagcatgtggatgagatgatccggattttaaagaaggtactgtaatattttttgaaattaacagcataaaaaaccagtcatgggacatattatctgcataagcaggaggtatggagatgactggttttttgattgcgcttttgtcgggagcgcttatgagtgtacagggagtatttaatacgcaggtgacgaagacaacggggatgtgggtgagtaatggatgggtgcagtttagtgcatttctgctgtgtgcagcggcatggctgatcgccgggcgggattctatcgggaatttgtggaaggtagagcccaaatatgtactcctcggaggagtgatcggtgcagggatcacatggaccgtgatcaagagtatggaggcactgggaccggcgaaggcagcacttctgattgtaatctcgcagttgatcgtagcgtacgtaatagaacttctcggattgttcggagtagacaaagaaccactggaaatccgtaaaattattggaatgtccattgccctgattggtgttgcaatttttcagtggaaatagtacaattatttcactaggcatatgcggggatttacagttttcgacaggctgtaaaggagaagttatgcatagggaaaaaagacagaacagaataacagaacagagaaaaatacagaaggaaatatgccgtatattgctgatctttaccatgatactgagtatgatatgtgtcgtgaatctgaccggatgcagagaccgaaaatcacaggaacagacggaacttatttcgttggacgggcatgaaccggatgtggaaaaagcagatggaaatactgcaaaagaggctgaaggatcagaagcgggaacggatgataacatgacagaaaaagatggccttaagcaggaaaaactacagatctgttatgtacatgtatgcggggcagtgaagtctccgggagtgtatgaactgacatcggacagtcgtttgtatgaagctattcagatggctggaggatttacggatgaggcagcaggtgaggctctgaatcaggcagaaaagattgaagatggttccagaatatatgttccgacgaaagaagaggcaaaagctggaacagagaacaacggtactttcgtacagaatgcggataatgaaaagacagatgcaacaaaaagcacagatgccggaagtacggcagatggcaaggtggatattaatacggccgggaaggacgaattgatgacactatccggaatcggagaggcgaaggctgacgcgatcattcgttacagagatgagcatggaaagtttcagaagatagaagatctgatggaagtggaaggtattaaagacggtgtatttcagaaagtaaaagatcaaattaagatctgacaagggagtaggaacatgagcagacgagtattggttgtggatgatgaaaaactgatagtaaaaggaatccggtttagtctggagcaggatggatatgatgtggactgtgcttatgacggagaagaggcactgaaactggcaaaggagaatgcatatgatatcattcttctggatgtcatgcttccgaaatatgacggttttgaagtgtgtcagcagatccgggaatattcggatgttccgatcattatgcttacagcaaaaggcgacgatatggataagatcctgggactggattatggagcagatgattacataacaaagccattcaatattctggaagtgaaggcaaggatcaaagccattatgcgccgtgtcagcaagcgcgataaaaatcaggaaaatgaaaaagtgatcgtaaaaggcgagatgaagattgactgcgaaagcagacgcgtgatcatcggagaaaaggaaatcaatctgacagcaaaagaattcgatcttctggaactgcttgccatgaatccaggtaaagtctacagcagagagaatcttttgaatatcgtatggggatatgagtatccgggagatgcaagaactgtggatgtacatatccggagacttcgtgaaaagattgaaacgaatccaagcgatccaaaatatgtctatacgaaatggggagtgggttattatttcaggggttaaaaaatattttaaaaagaatatattcaggagcatgaaattccggatcatcctgctggtggcactggcagggattgttccggtattgattatgagaggggtgttcctgaccagctatgagaaaagagcagtggaggtacgaactgctgagatacagaatcaatgtaccattctcagtaatcagctgagcagttcgggctatcttacgggagatacgtcagagacgatcagaacagaactggttcagctatctaatatctacagcggccgggtaatggtaatcgatggtaattttaagatccaggaagatacatatgaaatggatgaaggaaaaactattgtatcgggtaatgtgatccgttgtttcaaagaaaaaggaaccagcgagtataataagaaaaacagatatatagaagtgacagcgccgattttaggaaaagatgattcgattgtaggagtattgcttgtcagtgcaccgacagattctgtcctggacagtctggagattttaagaaacaaagcggatgtggcagcacttgcatcgatcctggttattcttatgattgctgtgctttcgggaatggctatgttaaaaccttttaaacgcattacagaatccatttctgcggttacagaaggctatgacgatgattaccttcatgagaatacgtacacagagacaatggaattatcggaagcgttcaataagatgtcgggacgcatgaagactctggatgactcgagaaatgaattcgtatcgaatgtgtcacatgagttaaagacaccgctgacatccatgaaagtactggcggattcgctgcttttgcaggaagatgcaccggtagaactctataaagaatttatgggggacatgtcggaagaaatcgagagagaaaataagattattaatgacctgctttcgctggtcaagatggacaagaccgcgaatacaatgaatataaagtcagaaaatatgaacgaactgatagaaaagatattaaagagactgcgtccgattgcggctacaagaaatatcgaactggtctatgaaagttttcgtccggtgacgacagaggtagatgagatgaagatctctctggcaatatcgaatctggtggagaatgccatcaagtataataaggaaaatggatgggtgcatgtatctttaaatgcggatcacaaaaactgctatattgaggtggcggattcgggaatcggtatacctgctgaagcacaggaacatatatttgagagattctaccgggtggacaagtcccattcaagagaaattggcggaacaggacttggtctggcaatcgcaagaagtgcagtggttatgcacagaggggcgatcaaagtattcagtcagccatcggaaggaactacttttacggtaagaattccgttaaactatgtatcttaggcagaaggagattaagatgaaaatgaaaaaaatttacaagatcctgctgcttatagctgtttgcatcatagcagtatcaggatgtaaaaaagaggacaaggttagcggcaccaggatttactatacagactcagagggagtttcactggttgagaagggcacaagaatcaaaggaaagacaaaaaaagcgcagattaattatgtgttagggaaagtccagaaaaatacagataatattaattatcgcagtgcctttgtgaaaggtgtaaagataaagaactggtcgcttcattccaaaaatctgacagtggattttaatcgtgcatatcaaaaactgagtgtaacggaagaaattgtactacgggcatcggtggtacagtcgcttggacagatagatggagtagatgctgtattctttacgatagaaggagagccgctggaggatcagaacggccaggagataggatatatgcagccatcggattttgtacagaatacgggatccagtctgcatgcttatcagaatgagacatttcttttatattatggaaataaaaagggcacccgtcttgtaaaagaaaaggtaaatgtcagatacagtagcagtgtgtccagagaaaaagcactggtcgaacagctgatcaagggaccggattcggataatgaatcagcagtgctcccagaaggaacaaaagtacttagtgtatcggtaaaagatcatatctgttacgtgaatctggacgccggattccttgatacgacgaatgtaatgaatccggaagttccggtatatgcaattgtgaattctattgtagatggaagtgcgatcagcagagtacagatcctgattgacggaaaaacagatattacttatatgggaaagataaatttggaaaaacctctttccagaaatcccaatattgtggaaggagagtagcatgtgaaaaacagaccgcttcttagtgtgtgtctgatggttctatgcatcattgcttttatggttgtgtgggggagagagcggttcataaaagaacttcgcccttccccgattgaacgatatgccgcagaaggtgataatattaccatttgcggcaaaatatacaggcaagagcaaaaagagaactgccggatgatctatctgaaagaaaattctatttattcaaactcaaaaaaatttcaagaatcgaaaattatcatttatacaaattccagccaaaaattacatataggaaaccagattaaagtgtgtggaaaggtatcattttatgaagaggccagaaatccgggaaattttgatcagaaattttattatcaaaaacagggaatccatgggaaagtccgatcggatgatatacagattacggattacaaacgaaacaaattaaaagacagacttgaaaaattccggatgaactggcagaaaatgctgcaacgcgagatgggagaacgggatggttcagcacttgcggcaatactccttggtgaaaaaagcggtatggatcaggaaatgaaagaattatatcaggtaaacgggattggacatatcctggcgatttccggacttcatctatcgtttgcgggacttggagtataccggatagcaaggagaatgacaggttcatacaaggcaggtggaatcacgggagggattctgttgtgtctgtatgtgatgatgatcggaatgaccgtgtcggtgatccgggcgtgggtgatgttcgtatttcggataggtgcggatattaccggtagacattatgatatgccgacggcacttgcggcttcagctgtgctaacggtcgggatccatccgctttatctgtacgatggtggcttttggttgtcgtttggagctgtttttgcagtttgtacggtgataccggtgcttgaaaatgagatgcggtgtaagagcctgtgtgcaggcctgggaatcaatgttttattgtggccggtgatcttatataatttttttgagattccggtgtatagtatactgctgaatcttataatacttccgctgatgtcggtagttttaacctgtggaatgatcgggtcatttataaagatggccgggtggatacccggaaaatggattttgtggatctgcagatgtatcttatgggtgtatgataaatgctgcgtttttacaataaagcttccgatggcaagatgggtggcgggaaggccggataagagaagaatctttatctattatctggtgcttatgacagtgattttgatattaaaatttaaaagaaacgggaaaaaatatatcataagtataacgctttatacggttggatttctgatattgatatcgggcccctgggtaagaaccggagcagaggttacgatgctggatgtaggacagggagactgtatctgtgtggagggaccggagcataagacttatctgatcgatggaggcagcagtgatataaaaaatgtcgggaaatatcggatagaaccgtttttaaagtacagaggaataggaagtattgattatgtgttcgtatctcatggagacatagatcatatgaatggaattgaagaaatgctgaaaaggcagcaggtcgggataaaaatacggaatcttgttgtgacaggagaagcgtaccgggatgaaaagttagaagagcttataagtgtagcagaagataatggaacgacggtctgggaaatggaaaacgggacgcagatcagagaaggaaagttgagattcacctgtctggggcccaaagaaaagaatatgaatcccggaaatgaagcatccatgatcctacatctggaatacgagggatttgacatgctttttacaggagacgtggaaaaagaaggagaagaaagtctgacagatacgctctcttatctacaggaaaagaagatttcatgggaggtattaaagactgcacatcatggatcaaagaattctacaacggaagcatttctggaaaatgtaaaaccaagatatgcatggatttcggcaggaaggaagaatcgttacggacatccacataaagatactttggaaagacttgaaaacagtggcgcgaaaatatattctacacaggaaaacggtgcgtttggaataactgtaaataaaaaaagtatgcggattcatgggagaaacggttgaacttaaaaggagaattcagtatacttttaagaggtgaaaaagataggagaacaccgatgaaaagtttaaatgaagatataaaaacaggaaattttaagccggtatatctcctgtatggggaagaggcttatctgaaaaagcaatacagagaccggataaccaaggcaatatttccggatggggatacggtaaattatgcatattatgaaggcaaagggataaatccgggtgaactcatagatcttgccgagacaatgccgttttttgcaaagcgtcgtctgatagtggtagaaaattcgggattttttaaaaatgcaacaccggatctggccgattatatcaagacgatgccggatacggcatgctttttgttcgtggaaaatgaggcggacaaacgaggaaagatgtataaagcggtgaagagtaaaggacgcgtagttgagatggcgcgtcaggatgagaagacgttattatactgggttgcaggtaatgtaaaaaaagaaggctacaagatcaaggaacagacggccagatatcttctgtcaacaacaggaacggatatggagaatctggaaaaagaactggaaaaactcttctgttactgtatgggaaaagaagagattgagatatcagatatagaagcaatctgtacaacacagattacaaataagatttttgatatggtagaagcggttgcaatgaagaaccagaaaaaggcgcttgattactattatgatcttctggcattaaaagaaccgccgatgcgtatcttataccttctgacgagacagtttaagctgcttttggaagtgaaagatctggtggggaaacgctacgataaatcatcaatcgcaaagacagtcggacttcatccgtttgtggcgggaaaatatatgcagcaatgccgcacatttgaaaagaaagagttaaggaacattctggaagaggctgtagataccgaagagatggtaaagacgggacgcctgaatgatgtgatgagtgtggaacttttcattgtaaaatacagtgctgcatgataaaattgataagataaacatttaattaaggagaagatattagtgtcaggaatagatcagagtaaaattcgaaatttttgtattatagcacatattgaccatggtaaatcaacactggcggaccgtatcattgagatgacgggacttcttaccagtcgtgagatgcagtcccaggtgttagacaatatggagctggaaagagaacgaggaatcacgatcaaagcccagacagtcagaacggtatataaggcaaaggatggagaagagtatatctttaacctgatcgatacgccggggcatgtagactttaactatgaagtatcccgaagccttgcagcttgtgacggggcaattctggtagtggatgccgcacagggggtagaagcacagacgcttgccaatgtataccttgcgctggatcatgatctggatgtagtaccggtattaaataagatcgatcttccaagtgccgatccggaacgtgtgattgaagagattgaggatgtgatcggaatagaggcagaggatgcgccgcagatttctgcaaagaccggactgaatgtagatcaggtgctggaagaaatcgtagcaaagataccggcaccaaccggagatccgaaagcaccgcttcaggcgttgatctttgattctttatatgatgcgtataaaggtgttatcgtattttgcagaatcaaagaaggaactgtaaaaaaaggaacaccgatccttatgatggcgacaggagctaaggcagaagtagtagaagttggttattttggagccggacagtttattccgtgtgaggaactgagtgccggaatggtaggctatattacggcaagtcttaagaacgtaaaggatacccgcgtgggtgatacggtaaccaatgcggcacatccatgtgcagaaccgcttccgggatataagaaagtaaatccaatggtttactgtggattatatccggcagatggcgcaaaatacccggatctcagggatgcgttggaaaaattacagttaaatgatgcatcactgcagttcgaacctgagacttcaattgcactgggattcggattccgctgtggattccttggacttctgcatctggagatcattcaggaacgtctggaaagagaatataatctggatctggtaacaactgcgccgggggttatctataaagtacacaagacaaatggagatgtgatagagcttacgaatccatcgaaccttccggatccttcagagattgaatatatggaagagccaatggtaaaagcagagatcatggtgacagcagagtttatcggtgcgatcatggatctgtgccaggaacgtcgaggcgtatatgaaggtatggagtatattgaagagacacgtgcagtattacattaccagctcccgcttaatgaaatcatttatgatttctttgatgcattaaaatcaagatcaagaggatatgcttcgtttgactatgagatggccggttatgtgaagtcagaacttgtcaaactggatatcctgatcaataaagaagaagtcgatgcattgtcgtttatcattcatgcagatactgcatacgaacgcggaagaaagatgtgcgagaagttaaaagaagagatcccgagacagttattcgagattccaatccaggcagcaatcggaagtaagatcatcgcgcgtgaaacagttcgtgcgatgcgtaaagacgtgctggcaaaatgttatggtggagatatcagccgtaagagaaagcttctggaaaaacagaaagaaggaaagaaacgtatgcgtcaggtgggcaacgtagagattccgcagaaagcatttatgagtgtattgaagctggatgataaataatgagaccattagagttatatatccatattccattttgtgtaaaaaaatgtcggtactgtgatttcctgtctgcgcctgcaacacctgaagcgagacaggagtatgtcatgggcttgtgccagaagatccgttcttattatgatcttgccggtatgtaccatgtaagcagtatttttataggaggcggtacaccgtccatattagaaactcagcagatgaggagtatcttcgatgcgatacgtgctacatttccaattgattcggacgcagagatcacggtagaagtgaacccggggacagtagataagttgaaattgatggcatatcggaatgtcgggattaatcgtctgagtatcggattacagtcaacggatgatcaggaattaaagatgctcggaagaattcatacatataaagacttcctggatacctatacgcttgcaagagaagtggaatttcagaatatcaatgtagatctgatgtcgggaattccatttcagacattgggaggatgggaagatacattaaaaaaagtggcagaacttggtccggaacatatctccgcatacagtctgatcatcgaagaaggaacgccgttctatgaaaagtacggagagggtgaacgcgctgaggcgagaagaagaagagaacttccggatgaagatacggaacggatgatgtatcagtttacaaaaaatattttgtggagttacggctatcacagatatgagatatctaattatgccaaagaaggatatgaatgccggcataaccttggatactggaaccgcacagaatatctgggaatcggaaccggtgcggcatctcttatcaataaccaacgattcgtagaaggtggtgagatcgaagttcttagtttgcagaatcagatggaagaatatatgtttctggggctcagaaaaatcgaaggagtatccaagactgacttcaggcagactttcggaagaagcattgaaaatgcatatggaaaagtactgatcgatatgtatcaaaagcagctgcttgaagacaccggcgaatacatccggttaacagaaaaaggaatcgatgtcagcaactatgtcatgagcgagtttctattttaaattgttccaatcaagatatcacaacggttaaggttccattatataattattatggcatacaaaaatgtaactgaataaaaggatagaagctatttctgtgcatatgaggtcatggtttgttgctctagagtttctccatgattgaatcagcacagaaatggcttctatccttttattcaggtccggggtaagtcaccaaaataattactacaacaacttcgccattactaacgcataaatctcctggttccgtttctgccagttgtttgcaatggttgcagcttcggattctgtcggggctgttacggtgaggtcgatcagaggaagtccctgttcgatgacctgacagcgtacagaatattccatgttggaattctcgaaatagtccgcttttacggacatctcattttttaattcgtaatgtttctcttttaaaaattcgtcgatatcatgttggattgcaggagagatatcgtttgtaaaataatggatggtctctgctccgtcttccgtaagatggtaaaatgtacggtgatgagtagattcttcacgaataaatcctgattccagaagttcggataaagcctgctgtaatttaaagtaggttgtatatccttcatccagaataaattctgatatctgggaattggtaagaggaaaatcaacttcgttcaacatatacaaaatgatcaatttatataacgtaaaagatttggccaaggttaacactcctttccctgccagatgtcatgtgtttttaagtaagactggaactgattcagaacttgccttttgttacaggtccataaaggggcgatcaaaagattttttggtccgtctccggttaatcggtggataacgatgtccggtcttaagtggctgatacacatcccgagaagctggtagtattcttccggtgtgggaatgtagaatggagaggccaggtagatgtcggccagatcggtatcttttaatacatgtaaaagctgcagtttgatgccctgaatatcctggtggttcaggtattctatggtcttgagtatatcctgttcggtttcatttggaagacacaggattgtatggacaataacatcgattccacgctttcgaagctcggatactgcattttcaaataccggaagctcataacctctgcggatatatcgggcgctttcttcatgaatagtctgaagaccaagttcaacccagactggtttgatccggtttaaattttccaggagatccagaatcttttcgcttagacaatccggtctggtagctatggaaagaatccggatatcaggatgtgtaattgcttccatatataatgtttccagatattctaaagaagcataagtgttggtatatgcctgaaaataagcaatgtaagatgatccggtatatttttttgcagactgctgcttcccagcttcaatctgctctgtgacagacagagtacgactggcggcaaaatcgccggaacctccacggctgcagaaaatgcaaccgtgggttccgagggtaccatccctgtttggacatgtcatgccgccgtcgagagatatcttatagagcttttcaccataagtctttttcagataataatccagagaatagtatcttttttctccccagtgtacggtcatatcagatcagttcctttacagcacggcttacaacatctgcaacacgtgggtcaaatgcttcaggaagaatattattttcattcagctcttcatcaggaacaagacctgcgattgcttttgcagtagccagtttcatatcttcggtgatggcagtagcacgtccctcgagagcacctttgaagataccagggaaagcaaccacgttatttacctggttcgggaagtcggaacggccggttcctactactttagcgcccgcagcttttgcaatatccggcatgatttcaggtaccggattggccatggcaaataagatggcatctttgttcatagaagcaaccatttccggtgtaacaatattcggagccgatacgccgacaaaaatatcagcgccttttaatgcatcggcgagtttaccggttttctgttccaggttggttacttcaaccatcttctcctgcatccagttgaggtctttggaatcttttccgagaattccatttatgtcgcacatggtgacatgtttaaagccgtaggtcaggagcagtttggtaatagcaactccggcagaaccggcaccatttacgacaactttggaagattccttatcttttccggttactttcatagcattaatgattccggcaagaactacgatagcagttccgtgctggtcatcatgaaatacaggaatatccagcagttctttcagtcgttcttcgatttcaaagcatcttggagcactgatgtcttccagattgatccctccgaaagcaggggcgatatttacaactgttttgatgatctcttcagtatcctgtgtgtcaagacagatcggtacagcgttgacaccaccgaattctttaaaaagaacagcctttccttccataacaggcattgccgcaagagcaccgatattaccaagaccgagtacggcacttccgtcagaaacaacagctacagtattggatttcatagtataagtataggcagcctcgggatcttttgcgattaccttacaaggttctgcaacaccaggggtataggcaattgcaagatcttcacgtgaatttacgtgggattttgcacaagtttcaatctttccatgccattcttcgtgcattttcagggctttttcactattcgtcattttatggataccaccttttcataagtttgtttaatcatatcattcatagaagttcaagtcaatatacgcacaaaagaggaattgggtagaatagatataccgttatgaaaaagaactttaaaaaagaacaaagatgtagtataatatctccatgtttcaaatagtatcgtcatttctgacgtgattttccagtaaagtaagagatgctacttaataaatgaagaaactagaatgaaagcagtttgatgtgaaaggactaatatgatgagagaaaaatatgaatctcttccgctggcgacgttaaaagatctcgctaaagcaagaggattaaagggaatttccaccatgaaaaaggcagaactgatagagcgtatgctggaagaagatgaaaaagaaaagaaatcggcacgagaaaccgtgaaagaattatctgctaatacaggagataaagaagtacatgatatagataagctggacagtggaattacggcacatgggattcttgaagttatgcaggatggttatggatttatccgaagtgctaattatctgccgggggaaaacgatgtctatgtatctccgtctcagatccgaagatttaatctgaaaacaggagatatactggaaggaaatacaagaatcaaaacacagcaggaaaaattcagtgcacttttatatctttcaaagatcaatgagatggatcctatgaaggctatgcacagaaaaaattttgaagatatgacaccaatctttccgaatgaaagactgagcctggaatgtggaaagacaagtactgcaatgcgcattatggatttgatgtctccgatcggaaaaggacagagaggtatgatcgtctcaccaccgaaagcaggaaagacaaccttattaaagcaggttgcattatccgtacaaaagaataatccggaagtacatcttttgattcttctgatcgatgagcgtccggaagaagtgacggatatccgtgaatcaatagagggaccgaatgtagaagtaatctattctacgtttgatgagcttccagagcaccataagcgtgtatcagagatggtgatcgaacgggccaaacgactggtagagcacaaaaaagatgtcatgatcctgattgacagtattacaagactggcaagagcttataaccttacagtacctccgtcaggaagaacattatccggaggacttgatcctgcagcacttcacatgccgaagcgtttctttggtgcggcgagaaatatgagagaaggcggaagtcttacaatactggcaacggcacttgtggatacgggaagcaagatggacgatgttgtatatgaagaatttaaaggaaccggtaatatggaactggtattggaccgcaagctttccgaaaaaagaatgtttcctgctattgatatcttaaaatcaggaacaagaagagaagatcttctgctttcaaaagaggaacaggaagctgttgaaagtatgagaagagcactgaacggactgcgtccggaagaggcggtagataacatactgaatatgttctcaagaacgcggaataatgaagaattaatacaaatggtaaaaaagacaaaatttatctagacaaaatttgattcttgtgttacaatgaacgagctgtgtaaataaaagaaatttactgcacattaagtgcgtgtcaaaaaataaagaagaggtgaaaatcatgaaagaaggaatacatccaaattattatcaggcaactgtaacttgtaactgtggaaatacattcgtaacaggatctacaagtgaagaaatccacgtagaaatctgttctaaatgtcatccattctatacaggacagcagaaagcaactcaggctcgtggccgtgttgataagttcaataagaaatacggaatggacaaataagattacaagtattgggttgaggtttttgaatctcaacccttttttcattacaatagatcttcgggcaagagatagtctttgttccagaagatgtggtataaggagaatatatgaaatcatcaaatatcggcggacaggcagttttagagggaatcatgatgaagaatcaggatcgttatgctgtggctgtcagaaaaccggacggagagatctttgttcagacagagacgtttcacagtattaccggcaattggaaaaaactgactacgattccttttgtccggggggtttttaattttattgattccatggtacttggaatcaagacgctgactttttcggcgagtttttacgaagaggaagaagaaaaagagctttccggaaaagatctgaaaaagaaagaaaagcaagagaacctgataatggcaggaacggttgccttttccattgttgcagcagttgcaatctttatgatattgccgtattttctgtcgacacttatgaaaccggttattccgtcgtatcatcttagaaccgtgatagaaggtgttgtccggattggaatttttattgtgtatattttgctgatttccagaatggaggatattcagagaacatttatgtaccacggtgcggagcataagtgtatcaactgtattgaacatgggctgccgcttacggtggagaatgtaaggaaaagttcgagacagcataaaagatgtgggacaagttttctgttttttgtgctggcgatcagtattattttactgttgctgattcgggtggaatcgcctttgatgcgggtggttgtccgtattgcactgcttccggtgatcgccggaatctcttatgaggtgttgaaactggcggggaacagtgaaaatgccctggtcaatctgttaagtaagccgggaatggcaattcagatgatgacaacccgtgaaccggatgatgatatgatagaagtagcgatacaggcagtagaagctgtatttgactggagggcgtatgaacgggaaaattttcacacttcgtaatctctaccagagtggaacagaaaaacttgaaaaggcagggatacgggaagcaaaactggatgcctggtatctgcttgagtataagaccggaatcagcagagcagtatttttggcagacccggacagagaagtagaagaagaaaaagcagaaagctatcagaaagatatctgcacaagagcaagaagaattccacttcagcatattaccggtgaacaggaattcatgggattaaattttaaagtgaatgaaaatgtgctggttccaagacaggatacagagattctggtagaagaggctttaaaacggatcagaccagatatgcagatcctggacatgtgtaccggttcgggatgtattctggaaagtattttgaaattcggcgaaaaaaaacagatgcatctgaaaggaaccggctgcgatatttcggaagaggcattgaaagttgcacgagaaaacaacagccgtctgggaacagatgcaagatttataaaaagtgatctgtttgaatctgtcaccggaaaatacgatatgatcgtgtctaatccgccttatatcaggacagaagaaatcaatcgtctggatgaggaagtaaaacttcatgatccatggattgcgctggatggaaaagaggacggactttatttttatcgcctgatcgtaaaagacagtataagatatctgaacaagggaggatatatcctgttcgagattggctttgatcagggaaaagatgtatcagaacttttgaaaaatgaaggatatgaggaaatcgagataaaaaaggatttagcgggacttgaccgcgtagttatgggaaggtacaataaagagtaatgttaaggaggaaataccatgtttgataaattagaagatctgcgcatccgtctggatgagatattaaatgaacttcaggaaccggatgtggcaaatgaccagaaccgcttccgcaaacttatgaaagagcagaatgatctgactccgattgtagaggcgtataatgaatacaaagaatgcaagcaggcaattgaggacagccttgagatgttagaggaagagtccgatgaagagatgcgtgaacttgcaaaagaagagttgaatgataacaagaaacgtgtagaagaactggaacaggaactgaagatccttcttcttccaaaggaccctaacgatgaaaagaacgttatcgttgagatccgtgccggtgcaggcggagatgaggctgcactttttgcggcagagatctaccgtatgtatatgcattatgcagaaagccagagatggaaagtcgagctagtagaatgtgaagagatcggtatcggcggaatgaaaaatgtaacattcatgatcgatggtaaaggtgcttattccaagatgaaatacgaatccggggtacaccgtgtacagcgtgtaccggagaccgaatccggtggacgtatccatacctctacgatcacagtagcggtgatgccggaggcagaagatgtagatatccagattgatgagaaagatatccgtatcgatgttatgcgtgcatctggtaacggtggacagtgtgtcaataccacggactctgctgtacgactgacacattatccgacaggaattgtaatctacagccagacagagaaatctcagttacagaataaagacaaagcgttcgctcttttacgcgcgaagttatatgatctggaatgccagaaacgtcatgatgcagaagcagaagcaagaaagagccagatcggtaccggagacagatcagaaaagatccgtacttacaacttcccacagggacgtgtgacagatcaccgtatcggacttacattatacaaactggataagatcatgaacggtgatattcaggagatcattgatgcttgtatcgcggctgatcaggcagcaaaacttgcaaatatgaatgaagaaatgtaagaagccggaatataagattttagaaagaatccggaaaattaaagaaggtaaatacagaatatgggagcaacacagtttaaacgtgcagaattagaggatcaggagattatctcacattactttgaacatcataccagcagaagctgtgagagaacatttgccaatgtgtatctctggtccagacagtatccggtaaaatgggcgatcatcaagaatgcactggtattcaaaagtgaggatgagaatcacgtatcctttgcctacccggccggagcaccggaagatgtgaagaatgccctggaagagatgatggaatattccaaagcgaagggcaggccattcctgatgtacaatgtgacaccggaatattttgcccagttagaggagtggtatccgggaagattccagattgaatacgacagagattctgcagattacgtctatgaatctgagaaactggcaacactttcgggaaagaaacttcacggaaagcggaatcatatcaacaaattcaaaagcctgttcgaagaccgctggtcttatgaaagtatgacaaaagataatctggaagaatgtttccagatggcacttaagtggcggacagagaatgactgtgaagatgatgatgaaaaaaggggagagatgtgcgtagcactgaattccctgagactgtttgaagaacttcatctgacgggaggagtcttaaggatcgatggtaaagttgttgcatttacgatcggagagccgatatgcgaagacacttatgtcgtgcatattgaaaaagcatatgccgatgtacagggcgcatatacgatgatcaatcagcagtttgtagagcatgaatgcatgaactataaatatgtaaaccgggaagatgataccggagcagaaggccttagaaaggcaaagctttcttaccgtccagcttttatggtagaaaagggtgatgtgacagagaaagcgcagggctaagacttacaaatgaaagacttgtagtgagaaaggagcaacaaaatgatagcggataagatgaaaaatatggtagccaacagttcggctatccgtgcaatgtttgaggaaggtaaccgtctggcaggaatttacggagctgagaatgtatttgatttcagtttgggcaatccgaacgtgccggcaccggaggctgtgaagaatgcgatcattgagattgtaagtgaggaagatccaatcgtacttcacggatataccaacagcaactgcggatatgcagatgtaagagaggcagtagctgattctttaaataagcgttttgatacgcattttgaaggcaaaaatattgtcatgacggttggtgcagccggtggattaaatgttatcttgaaagcgctgatcaatccgggagatgaagtgattgcatttgcaccatattttggagaatatcgttcttatacgaacaactacgatggtgtactggtagaaatctcaccgaataccgttgacttccagccaaaactggatgaatttgaacaaaagatcacaccaaagacaaaagccgttatcgtcaataatccgaacaacccgactggtgttgtatattccgaagagacgatcaaaaagctcgccgctatcatggaggcaaagcagaaagaattcggaacagacatcgttctgatctccgacgagccttatcgtgagctggcttatgacggagtagaagttccgtatctcacaaaatattatgacaataccgtagtgggatactcctacagcaaatcattgtcacttccgggagaacgtatcggatacttggttattccggatgaattaaaagacagtgaagaagtactttccgcagccaatgtcgcaacacgtatcctcggatttgttaatgcaccgacactgcagcagaaggtagtagaaaaatgcctgaatgaaaagacagacctttctttctatgatcgcaacagagaagatctgtataacggactgaaagagtgcggatttgagtgcattaagccacagggagcattttatttgtttgtgaaatcaccggttccgaatgagaaggaattctgtgaggctgcaaagaaatataatattctgatcgtgccgggaagttcgtttgcatgccctggatatgtaagacttgcgtactgcgtatcacatgagacaatcgtgaattcccttccaaaattcaaagaactggcgaaagaatatttctaggagagcagcatgaaagcatttgaaaagaacattcgaaaagtagaaccgtatgtgccgggcgagcagccacagcgcaaagtaatcaagttgaataccaatgaaaacccatacgcacctgcaccgggcgtgacaaaggcgttggaggagatgaatacagaccgtctgcgtctgtatccggatccgacggcggcaccactcgtaaatgcgctggctgatttttatcatgtgaatccggatcaggtattcgtaggagtaggatcggatgatgtgttatccatgtgtttcctgacattttttaactcagagaaaccaatcttttttccggatatcacctattctttctataaggtatgggcagatctgtaccgcattccgtatgaatgccagaagcttgacgagaactttaagattgtaaaagaagattattacaaagaaaatggtggtgtgatcttcccaaatccgaatgcaccgacaggactttatgaagagctggttgatgtagaagatattatcgcacacaatcaggatgtaattgtgatcgtggatgaagcttacgttgatttcgcaggaagttctgcaatggaactgatcgataaatatgaaaatctgatcatcgttcagacgttttcaaaagcaagatcaatggcaggaatgcgtattggttacgcgatcagtaatccgacactgatcaagtacctgaatgatgcaaagtattctttcaactcttacaccatgaatcagacatcactggtatgcggtgtggaagcggtgaaagataaggcatattttgaagaatgtgtgaataagattatcgagacacgggaatgggcgaaagaagagttaaagaatctcggattccactgtctggattccaaatcgaacttcatctttgccatgcatccggattatgatgcaaaagaattatttgaagcactgaaagagaatgacatctatgtgcgtttctggggcagtgaaagaattgaacagtatatgcgtatcactgtgggaaccagagaagagatggaagcaatgtttgcatttctgaaaaaatatatgaataaataagaggagtttcttatgaccaatacgttaatacatgggattattgatgcgttaagcggaagtgtgagtaaagaagtgatcgtatttctgatctcgatgatcccgatccttgaacttcgcggggcactgcttgttgcaggaccgatccttggagtaaaggtatcgactgcgattccaatttgcattatcggaaatatcattccagttccatttattttgcttctgatcacaccggtatttaactggatgaagggaacgaaaacattcaagccgctggtggataaactggaatccaaggcgatgcggcagaaggaccagattgaaaaatatgaattctggggactggtgttattcgtgggaatccctcttccgggaaccggcgcatggacagggtctctgattgcagcacttctgggaatgaaatttaagaaagcatttccggctgttatcattggaatttgtatggcaactgtaattatgtggtttatatcgtatgtacttcttggaggggtacatctgttaggataaagataagggaaaagatatgtctatgaaagtaaataaagttctgccatcaccggcagaactgaaagaagaatatccgctgtcagagaaactgattcagttaaagaaagaacgagacgcagaaatacgtgatatttttaccggaaaatccgataaattcgcagtgatcatcggaccttgttcggcagataatgaagattctgtatgtgaatatgtatgccgtctggcgaaggtaaatgaaaaggtaaaagaccgcctggtattgattccgagaatctataccaataagccaaggacgaccggtgaaggatataagggaatgcttcatcagccagatccggataaagctccggatctgtatgctggaattatggcaatccgtaagatgcatattcgtgcaatgaaagaaagcggactgacagcagcggatgaaatgttatatccggaaaacagaagttatctggatgatatcctttcctatgaggcagtgggtgcaagatcggtggagaatcagcagcaccggctgacggcaagtggtatggatattccggttggaatgaaaaatccgaccagtggagatctttctgtaatgctcaactcgatcgtagcagcacagatgggacaccggttcatttacagaacgatggatgtaacgacgtctggtaatccacttgcacacacgatccttcgtggcggagttgacaagtacggacagtgcataccaaattaccattatgaagaatgtgtaagactctgggaattatatcagaaaaaagatcttaagaatccggcagcagtgattgatgtgaatcattcgaattcaaacaagaaatataaagaacagattcgtattgtaagtgaggtactgcattcgcgcagatataacccggatcttaagaagatgattaaaggagttatggtagaaagttacctggaagaaggcagacaggatatatcggctgatatgatctatggaaaatcgatcacagatccatgtattggatgggaagatacagaaaagctgatctataaaattgctgaagaatgttaaaataaaaacagaagaattatctacagaacctgccagtggcaagttctgtagacaataaatgaagaaagtcacatgaaaagttttggcggaaacttctcatgtgactttcttacaaaacgctatcaagagagggttcgtgggaggggtagtaccatccaaacacgaacaatttgcgaaatcgtcgtttcacataataaaataatacatcaggtaactgtattatttgttattattttatcaatcattttcggattcgtaaataggcaaaatgacaaaaaaataacggaatttttgtaagaattggcaaatatgcactttaagagcctgtgtctttaaaaatgtaaaattctatgataaaatgaaatatgaaacaagtgtaagatttaggataaggagattttaggatggaaaagatatatgacgtaacagcacttggagaaatgctgatcgactttgcagtgaatggggaaagtgagcagggaaatcagttgtttgaagcctgcccgggtggtgcgccgtgtaatgtgcttgcaatgttgaacaaacttggaagaaaaaccgcattcattggaaaagttggggatgaccagtttggtaaactgttaagagatacgattacaaatatcggaatagaagcaaaaggacttgtgatggatcaggatatccacacgacactggcttttgtacatacttttccggatggtgacagagaattttctttttaccgcaaaccgggagctgatatgatgctgaaggaagaggaagtagattatgatctgatccgccagtcaaaggtatttcactttggaacactttctatgacagatgagccggtgaagagtgcaacaaagaaggcacttgcagtcgctaaagaagcaggctgcatgatcacatttgatccgaacttacgtccgccgctgtggaagactctggatgaagcgaaagcacagatggaatatggcttcgaaaattgtgacgtactgaagatctctgacaatgagatccagtttgtatcaggaaaagaagattatgatgaaggaattaagtatcttcaggaaaagtatcagattcctcttatcttcctgacgatgggaaaagaaggaagcagagcctactataaaaactttcgtgtagagcagccgggatttactgtgaaagcaattgagaccacaggagcaggagatacattctgcggatgttcgatcaacggtgtattaaagtacggtctggataatctggatgagacaaaattaaaagagattctgacatatgcgaatgcaggtgcagcactgatcacaatgaaaaaaggtgcgatccgttcgatgccggaaccggaaaatatcaaagaactgatcgggaaataggtaattatgggagtacgcagaatgctggccgtatgggcagcgaagataagtgaaaaagcaagtgtacatatctttcaccgccagggcgtgacctgggcgggaaagattgcactgaagattgatccaagcatcctgcatgatcttgcgggacaagtcagaaaagacatttttattgtatgtggaaccaatggaaagacgacaaccaacaatatgctctgtgcagcaatcgagaaggaaggttataaagtaatctgtaaccataccggttccaacatgttgaatggtgttgtggcagcctttgtattaggtgcgggtttaagtggtaatctggatgcggattatgcatgtatcgagattgatgaagcttcgacaagaagggtatttccacactttaagccggattatatggtactgacgaatctgttccgtgaccagcttgaccgttacggtgagatcgacattacaatgaatatcttaaaagaagtgatgcagagtgcaccaaagatgaaggtgatcgtgaacggggatgatgcattgtctgcttaccttgcaatggaaagcggtaatccgtatgtaacttacggaatcagtgaaaaagtagtggatgataaggattcccatgagatcagagaaggacgtttctgtaagaaatgcggagcaccgttaaaatataatttctatcactacagccagcttggcgattatgcatgtacaggctgtgattttaagcgtccggcaattgaatatgatgcatcggatgtggcagtcagcgaccatcttgcgtttacggtagatggcagacgcctggaggccaattataaaggcttctataatgtatataatattctggcagcctacgcggctggaagaaccggagggcttgggctggagcattttcaggatatgcttacagatttcaacccggaaaacggacgtatggagcagtttgaggtaaaaggcacaaagatcgtgctgaatcttgcgaagaatccggcaggattcaatcagaatatctcagcggttatgcaggatgattccatgaaggatgtgatcattgtgatcaatgacaatgcacaggatggaacggatgtttcgtggctttgggatgtggactttgacagatttaagggtgctaatgtgaattcgattacagtaagcggtatccgttgtcaggatatgagacttcgtatgaaatatgtggatatcccatctatgctggaagcagatgttgaaaaggcaatccgggaaagggttgaagatggctgtggcaacctgtatgtactggtgaattatacggctctgttcagtaccagaaatgtattgaaaaagatggaggaagaaagataatggatacaaaagatatgaaaattacgatagggcatctgtatccagatcttttgaatctgtacggcgacagagggaatatcgcatgtctgatgaaacgatgtatctggcgtggaattgaagcagagacgatagagtttaatacaggggatcagatagatttttcaaaattggatattgtactgttaggcggaggttcagaccgtgaacaggcaatcgtatgtaaaagtcttcttgagattcaaagtgaattcaaggattatgtggaagacggaggagttgttattgcagtatgcggaggatatcagcttcttggaaaatattataagacagatgccggaatgatcgagggactgaatctggttgacatttatacggaacaggaagagggacgtctcatagataatattgtactggacagtgatcttgtagatatgccggtggttggatttgaaaatcatgggggaagaacatacctcaatggaaataaaccatttggaaaagtattatacggagcgggaaatgacgggaaaagcggctatgaaggtgtagtttacaaaaatgtaatcggtacttatctgcatggtccgttgcttccaaagaatccacaggtgagtgactatctgatccagaaagcgctcgaaagaaagtacggggaagttcagttaatgcctctggatgacagtcaggaaaaagaagcaaatgattatatttatcaccgttttgtgaaataatgcaggattaaagagctgatttgctgcgtgcggattcatcccgctgttccaggtattgaagaaagtttaacaattcttttttagaagaattagataagcggtgaaaatgggtgagaagatagtgctctgatttttgagccgttgagttatcggaaagtgtgatttcactgatatcatcgtccagcagataatcaactgaaacatgaaaaagctcagcaagaatcgtcagtttttcgtgagaaggctgacgattctttgtttcatacccggcaatggtagaacgtgcaacattgagatgttttgcaacatatttctgggtataatgattttcttcacgtaatttttttagtttttcagaaaatggcatgtcggatacctcctaaattgattggtatattttaccaagggttgcacttcggaacacggaaagtgtcgattctcaacgaaatgtgtcgcagatgtgccgaaatggaacaaaaagaggcgaaagtgcataagtggagaacaaacagattgaagtgaatattaagagaaggaagcagataaagtgagagtagaacgttttaaaatggaaagagaaggactggtaacggaaggacaggaagttgagatcagtgaaagaagtgctgtgacaggtcagtacacttatcttgtagagccatccattgcgatgtcaggaatttatcgtacaagacagagaataaagtcaagaaagggaaaaatacagaaaatcgaacagacagacagaggattttatctgttagtagagattgatgagtaatgaaagaagaaacaaacgattaccccgtcgttgacatgaaagtaaaaaccacatataatttaatatgatggtaatactaaaaaatagaattattaaagaaaggaaatggatagatgatagcaaacaatgatgaggcaaaaagaagtaagatatggacagtcgttacggctgttacatctgtcctgatcgtaattatagcaatctttcttttaatgaagatgtttacaggaaacccactggagggatcatggacagatgaagacggtaatatggatcttaagatcggtcggaacggacagatgacagttatacttccggcatccggggatggagaagaaacgcaagtcccgatgacatatacgctcagtaaggaatccaagacgatatccattcaggaggatgataataagattcaggaaattgcagaaaaatcaaatggtcagtatacagaagagacgttaaagaatgcagtgcagtcgataggaacgacatttgaatacagtattgatggcggaacaatgacattgacagaacgtgaatatggtgagcagatgatgttcaataaaaaatagatgagggcccctctatgcagtgtatagaggggtgtttgttatacataccaaagtatgaaatagaagctgccagtggcaggttatgtagataccaaagtatgcaagagaagttgccagtggcaagttctctgcatggatatggatatggaaaaaggaggaaaataaatggataactacaggaataaaaccagaaaagtacaaattggggatgtatgcatcggtggtggagaaaaaattgcgatccagtctatgacaaatacaaagaccgaagatgtagaagcatgtgtggcacagattttaagacttgaaaaagcaggatgtgatatcattcgtgtggcagtgccaacgatggaagcggcagaaagtatcagcaagattaaaaagcagatccatattccactggtggcggatatacattttgattatcgcctggcaattgcagcaatcgaaaacggagcggataagatccgtatcaatccgggaaatatcggagatgaaaaaagagtcagagcagtggtagaaaaagcaaaagaatatcatataccgatacgtgtcggagtgaacagtggatcgcttgaaaaacatctggtagagaaataccatggagtgacagcagaaggactggtagaaagtgcactggataaagtgcatctgatcgaaaatatgggatatgataatcttgtagtaagtatcaaatcttcagatgtgatgatgtgtgtaaaagcgcatgaattgcttgcaccgcaatgtccatacccgctgcatgtcggtattacagagtcaggaacattacttgcaggaaatataaaatcatcgatcggactcggactgatcttaagtcaggggattggagatacgattcgtgtatctcttaccggagacccggtagaagagatcaaatcggccaagctgatcttaaagacactgggacttagaaagggtggaatagaagtagtatcctgcccgacctgtggaagaaccaagattgatctgatcggactcgcaaatcaggtgcaggatatggtggcggatattccactggatattaaagttgctgttatgggatgtgtggtaaacggacctggagaagcaaaagaagcagatatcggaattgccggaggatgcggagaaggtcttttgatcaagaaaggtgaaattgtcaaaaaagtaaaagaagaagaattattggaaacgttaagacaggagttgttacactggaatgagtaaaccgttttttgaggtatttccgacgttaaaagtaaaagatgatatacagatgatgtttcagggtgtggaagtgacgaaagtttctaccaattcaacaagggattttatccgtgtcagcctttacagcagacatctgatccagaaaaaacatatttacgaagtagaacgcctgctaaaacagcagctgtttgccagaagtcatatccaggtgtcggtaaaagagcagtatgatctttcagaacagtatacaccggaaaatctgatgaatgaatattatgacagcttcctgatggaactggatcaaagaagcgtagtagagcggaatatgctgcagaatgcaagttatgaatttgaaaacggaaatatcctctgtctgacactgactgataccattgttgcacagggaaaaaaggattcgctatctacatatctttcagatgtgtttgaagaacggtttcacaggcctgtggagatccgtgttctttatgaaaaagcaaaagacagcaagctgaaatacaacgaggcgaaattagagcaggaaatcgaagcaatcagagaacagtcgcaggccgtaaaagcaaagaaagcacaggaactggaacaaaaagaagagaagaaagacgaaaagaccaaagcaaaaagcaactcagcaggagaaagcgggaacaataccaaaagtggcagaagaagttcaggtggatttaagaagggcggctcattcggaaaaggtggatattcctttgtacgtaaagctaccgatgatccaaaccttatctacggacgtgattttgacgatgagacgatagaacttaagaatgttctgggagagatgggagagattaccatccgcggaaaagtcatcagcatggagaccagagagatacgtaacgagaagacgatcattatgtttgcagttacagattttacggattctattatggtgaaaatgtttgtgcggaatgatcagctggcagatatcctgggggatattaagaatggcgcatttctgaaattaaaaggtgtgacaacggttgaccgttttgattcggaactgaatatccagtcggtagtcggaatcaaaaagatcagtgattttacagaatccagagtggatacggcaccggaaaagcgtgtggagcttcactgccatacaaagatgagcgatatggatgcggtaactgatgtaacaacattgctgaaacaggcgcatgactgggggcatccggcgatggcgattacagatcacggtgtcgttcaggcgtttacagatgcgaaccattatattgagtcgctggataaggatgatccgtttaaagtgatttacggtgtggaaggctacctggtggacgacctgactgatgtggcagtgaatgaaaagggacagccactggatgatacttatgtagtatttgaccttgagacgacagggttcagtccaattaaggataagattattgagattggtgcggtgaaggtagaacatggagagattactgataagttcagcacattcgttaatccgaaagtaccgattccatttcagatcacacagcttaccagtattacagatcagatggttataggagcaccggatatcgagacagttcttccacaattcctggaatttatcggtgatgcggcactggtcgcacacaatgcatcctttgatgtaagctttattgaacaaaattgcagatatcaggatatccagccggatttcacatcggtggacaccgtggcgatggcgcgtattcttctgccgacactttcaaagtacaagctgaatgtagtggcgaatgcactgcatatttcgctggaaaatcatcacagggctgttgatgatgccggggcaacagcagagatatttgtgaaatttatagaaatgttaaaagacagggggatttatgacctggcaaaactgaaccagttcggcgaaaataatgcggatgctgtccgcaagcttccatcataccatgtgatcattctggcgctgaatgaagtgggacgcgtgaatctgtatacgctgatctcaatgtcacatctgaaatattatgcgagaagaccgagaattccaaagagtgaactgtcgaaatacagagaaggacttctggtgggaagtgcctgtgaggcaggagaactttatcaggcaatactgaatgacaaatcagaagaacgcattgcaaagatcgccaacttttatgattatctggagattcagccgcttggaaacaaccagtttatgattgaaagccagaagatcacgaaggtacagaatgaggaagacttaaaagaaatcaacaggaagatcgtcgcacttggtgaacggttcaataagccggttgtcggaacttgtgatgtgcatttcatgaatccggaagatgaggtatacagaagaatcatcatggcaggaaagggctttggtgatgcggacaatcagccgccgctgtatcttaggaccacggatgagatgctggaagaattcgaatatctggggtctgcaaaggcaagagagattgtcatcgagaatccggtgaagatcgcggagatggtcgaaaagatcacgccggtgcgtccggacaagtgtccgccggttatcccggattcggacaagatgctccgtgatatctgttataataaagcacattccatgtacggagagaatcttccggagatcgttaccgagcgtctggagcgagaactgaattcaatcatatccaatggttttgccgttatgtatattattgcacagaaactggtatggaaatcagtggaagacggatatctggtaggttcacgtggttccgtaggatcttcttttgtagcgaccatggcgggaatcacagaggttaacccattaagtccgcactattactgtaagaaatgtcattacagtgattttgattcggaagaagtcaggaaatttgccggaggctgcggatgggatatgccggaccgtgtatgtccggtatgtggagagaagcttataaaagatggatttgatattccgttcgagactttccttggattcaagggaaataaagagccggatattgacctgaacttctcgggagattatcagagtaatgcgcataagtatacagaggttatctttggtgcgggtcagacattccgtgccggaacggtaggtacactggcggacaagaccgcattcggttatgtaaagaattattacgaagaacatggacagggtaaaagaaaatgtgagattgaccgtatcgtacaggggtgtacgggaatccgccgaagtacaggacagcatccgggaggaatcattgtacttccgcttggcgaagagatcaactcttttacaccggtacagcatccggcgaatgatatgacgacggatatcgtcaccacacatttcgattaccattcgatagaccataacctgttaaagcttgatattctcggacatgatgatccgactatgatcaagacactggaggaatatatcagttccccggcgatggacaacgaatacaatgagacggataaccgttttgatgctacgaagatcccactggatgatccgggggtaatttctttgtttcatgatacatcggcacttggtatcaagccggatgatatcggcggatgtccggtcggatgccttgggatcccggaatttggaactgatttcgttatccagatggtagtggatacaaagccgaatacaatttcggatctgatccgtatctccggtctgtcacatggaacggacgtgtggctgaataatgcacaggaactgatccggagcggaaaggcaaccatttccacggcaatctgtacccgtgatgatatcatgacctatctgatcaacaaggggatggacagtgaggaatcatttaccattatggagcgtgtccgtaagggaaccgttgcaaaaggaaaatgtaaagaatggccggagttcaaaaaagacatggcagaacacaatgtacccgactggtatgtctggtcctgtgaacagatcaaatacatgttcccgaaagcgcatgcggcagcatacgttatgatggcataccgtatcgcatactgtaagatcaactatccactggcatattatggggcgtattttggaatccgtgcagatgcattttcttacgagatcatgtgccaggggaaggaaaagcttcagtactatattgatgattacaaccgccgttctgcgacactcagtaaaaaagaacaggatacgatgaaggatatgaagattgtgcaggagatgtatgcaagaggattcgaatttgagccgcttgatatctacaaagcacaggcgacaaagttcctgatcgtaaacggcaagctgatgccgccactttcgagtatcgacggtatgggagaaaaagctgccgaggcagttgcagaagcatctaaagacggaacttatctgtcactggatgacttcagacagagaacaaaagcaagtaagaccgttattgacacgatggtagagcttgggatccttgcagatcttccggcatcgaaccagctgtcattgtttgatttttagagtgccagatagcaaaaaagcaggagaaagataacagatgggaagaatgaaacagtcacagatcacatactggtgtcacgagatcatccgctcgcaggcagaagaaggcggatattatatcgatgcgactatgggaaaggggaatgataccctgttcctgtgtgagcttgccggagaaaaaggaaaggtacttgcatttgatattcaacaggaagctctggatgtgacgaaagaattactgaaaacgcatggaaaagaaatgcaggcagaattaattctggatggtcatgaacatatggaccggtatgccggaaaagagagtgcagacgtgatctgctttaatttcggatatcttccgggaggcaatcataatcttgcaaccacatacaggaccagtattgaggcaatcggaaaaggccttggcatattgaaacacggtggtatgatgagcctgtgcatttacagcggcggagataccgggtttgaagagaaagaaaaaatcctggaatatgtgaaagcacttccgggaaaagagtataccgtgatcgtcaatgaatactataaccggaagaactgtccgccgatgccggtatttatcttcaaggaataagtcggatgatgacaggaatcggaaaagaataaatcagaaatgagggtatgcggatgagaagaaaagacagagaagtaacagagatggaagaaatccaacagatttttgatgaatgcaaggtgtgcagaatcgggatcatggatgagaacgggccgtatattgtgccggtgaactatggatacgtaagggaagaaggaaaagtgatcctttatatccatggtgcaagagaaggaaaaaagatcgatctgatcagaaaaaatgcaaatgtcggagttgaaattgattacagacatgaactggtggaaggagataccgcatgtcagtacagttattactatgcaagtatcatcggaaaaggaactgcaagtattatcgataatccaagagaaaagctaaaggccctgaatgttatcatgaagcaccagaccggcagaacatttgatgaattccagaaaaatccaaatcttgaaaaagcggtagcaatcattcgtatagacctgaatgagtatagctgcaagaaacatatataaaaaaccatgtttctgccaaattaatgctttaattcgcgaaagtattgtgttatactattacaaggtggcgtaaatggaatgccgcttacacgaaaggatggaaaagaagtatgtcagaaaaagtaattatgcttggaaacgaggcgattgccagaggtgcatatgaggccggagtaaaggtttcggcagcatatccaggtacgcctagtacagagatcagtgagaacctggtcaaatataaagacagtttatactgcgagtggtcaccgaatgaaaaagttgcgacagaagtagcgatcggtgcatctgtagcgggggtacgtgcgatgtcctgtatgaagcacgttggatttaatgtggccgcagaccctacatatacagtttcttatatgggtgtaaacggaggacttgtcattgttgttgcggatgatccgggactttacagttctcagaatgagcaggatacaagaatggtagcacgtgcggcacagctccctgttatcgagccttcagacagttcagaagcaaaagaatttatcaaagtagcatttgatctgagtgagaaatttgaccgtccgtttgtttaccgtacaacaacaagactggcacattcccagggacttgtagaattaaacgaacgcaaagaaatagaagataaaccatatgagaagaatatccgcaagaatgttatgatgccgggaaatgcaaaactccgccacgtagagattgaaaagcgcaatctcgaacttgcggaagctgctaatacacttccaatcaacaaagtagagatgaatgacacaaagatcggtgtaatcaccagcggtattccataccagtatgtaaaggaagcacttccggaagcatctgtattaaaacttggtatggtaaatccgcttccaagaaagctgatcgaagaatttgcttcaaaagtagataccttatatgttgtagaagaactggacccggtgattgagacacaggttaaatcctggggcatcaaagcgatcggaaaagaaatcttcacggtacagggggaatacagtgccaatatgctccgtgaggcaattctgaaagaagaacttgatatcagtaagcctgcgcaggcaccgggaagaccaccaatcttatgtccgggatgtccacacagaggtgtgtactatgtactgaacaagttaaagattcatgcggcaggtgacattggctgttatacactgggcgcagtagcaccacttagtgttgtggatacaaccatctgtatgggagcaagtatttcaagccttcatggtatggaaaaggcaaaaggaaaagaatatattaagaactgggttgctgtgatcggcgattctacattcttacatacgggtgtcaattctctgatgaatatgatgtataacaaagcaacaggaaccgtcatcatcttggataactctacaaccggtatgaccggacatcaggatcatgcggcaacaggaaagacactgcagggagatccgacatatgcaattgatattccggcattatgtcgtgcaataggtgttaagaatgtggtagaagtcaatgcaagagatattcaggctgtggaaaaggctgtaaaagaagagattgccaaagatgaagtatccgtgatcattacgaagacaccatgtgtacttctggacaaatcaaagaaaccgttatatcagacgcatacagataaatgtaagaagtgtggtatgtgcatgaaacctggatgtcctgcaatgacaaaaaatgctgacggaacagtgtccatcgatgatacgatgtgtactggatgcggactttgtgcaagcctgtgtaaattcgatgcgattgagttagtaaaggaaggtgacagataatggcaacaaagaatattatgattgtcggagtcggcggacagggaacactgcttaccagcagaatcttaggaggacttgccattaccggcggatatgacgtaaaactttccgaagtacatggaatggctcagcgtggaggaagcgttgtaacatttgtaaggtacggagaccaggtggcagaaccaatcgtagaagaagggcaggcagatgtgattatcgcatttgaacgtctggaagcactgagatatgcacatttcctgaaaaaagacggagcattgatcatcaatgactggagaattgatccgatgccggttgtgatcggggcagcagagtacccggaagacattattgaaacactggggaaagatcacaaagtatatacagtaaatgcaacagaagaagcaaaaaaaatcggtaattccagagtattcaatctgattgtgcttggagttgcagcacagcacatggactttacaaaagaacaatggtatgaggtgattgaaaagacagttcctccgaaaactattgagataaataaaaaggcatttgatgttggttattatttataaggaggtacataagaggttatggcaaaggtagcattaaaggactggaaagaacagatcagagatcctaagattgaatgcatgagcagggatgagatgactgcacttcagagtgaacgtctggtaaaacaggttaagaatgtatatgaccacgtagaattttatcgcaagaaaatggatgatataggaatcgaaccgggagatatcaaggggattgaagatatcggtaaacttccatttacgacaaaagaagatttaagagcgaattatccattcggacttctggctgttccacaggaaaagatcgtcagagtgcagggaacatcaggaacaaccggtaagctgactcttgcttcttatacacagaaagatgtagatgtatggggagaatgtgtggcaagaggacttacgatggcaggacttactgcagaggatcgtctgcatatctgctatggatatggcttgtttacaggaggaatgggactggatttcggagcaagaaagcttggagcaatggctattccgatgtcagcaggtaatacaaaaagacagttgatgtgtatggaagattttggtgcgactgcatttgcatgtactccatcttatgctttatatctggcagaagctgccaacgaggcaggcatcgtagataagcttcggttaaaagtaggaatcaatggcgcagagccatggacagaagagatgcgtctgaagattgaagaactgttaaatgttaactgttttgatatctatggattgtgtgagattacaggtccgggtgttgcactggaatgtatccatcataaaggaatgcatatatatgaagattatttctatccggaagtattgaatccggcagatcatacaccatgtgcagacggggagacaggagaacttgtatttaccacacttgtaaaagaaggtatgccgttacttcgttacagaacaaaggatcttacaagtattgatcattctacgtgtgagtgtggaagaacgcttcctagaatttccaagttcaaaggccgtacagatgatatgaaggttatccgcggagtcaacgtattcccgacacaggtagagacagccctgctttctatcggaggcggtgttgcaccacattatatgatgatcgtagatcgtgaaaataacctggatgtactgactgtaatggtagaagtagatgaaaaatatttttcagatgagatccgtaagctagatgaactgaagaacaaagtggctgcagtactgaaacaggcacttggtgttgcagtaagagtaaaacttgtagagcctaagacaatcgaaagaagcgaaggcaaggcaaaacgtgtcattgataacagaggtttataaacaggagggaataacatgggcgtaagtaatactgtacaacagttatcagtttttttggaaaacagagaaggacgtctggaagaagtattggatgtactggcaaaaaaaggtgtgaatattgttgcactgagtcttgcggatacatcagattatggaatgcttcgtctgatcgtttctgacccgcacaaaggacgtgcagcattaaaagaagctggaattacagcaatgctgacagatgttgtagcacttcgtgtaccacatgcaaccggttcattgaataaagcaatgcatcagattgtagatggagaagtgaatattgaatatatgtatgcatttgcaaatggagcagatgcagcagctgtattaaagagtgatgatcctggaagggtgatcgatattcttaaaggtagtggtttcgacgtgtatagcgcggacgaggcatatcgtgctaatcaatagaagtgaaagaggaacagtatgagtgtagacaaaaacagcgttttaaaaaagttacgggaatcggatgccatctatgtattgatgtctgattgtacaagaatgccttttgtggtatgtgatccggagacgtatgatgatgaagtgtttgtattcttttcagaagaagatgcaatgcgcggaggacaggaattcctgaaggcgaataatccgttaaaaatttttaatattgaaaaaaaatacctgcttcctttctatagcagtttattcccaatcggggtgaactgtatggtaatcggtaaaggaacagaagaagagattgcgattcagttaggggaactggttagaagaccggaacagaagccgggcgaagaaccgattgagaatccggaacttcagattactgcaatgtattttatgcagaaggtaagaagccagaaagaattaaaactcacggatgaaacaaaggaactgcaggaagaactgatggcacattatcagaggggcagatatatcacggcaatcagtgaagataaaaaaatgccgattttgaataaagatgacggacaggtactgatgccgatctttacagacgttcaggaattcctgaaattccagaatgagaacagagatatgaagtatacaatgggagttgtcgaagcagccagaattccggaagcaatgggcccggaagttacgggagttgtggttaatccatttggaattgatcttcagctgaatgtttcaagaccacagaaataatactgaataatacagaagaaccggtcatctgtgtatcttcagatgaccggtttggcagatatgataaaagccagataactgcagttatctggctttttctcataatcctctctcgttaagtcatgtattacttttaaatatttaaatccgaaatagatatattttaatatataaaagggacattaaaaacttagattgttgcgattagagtggtgttacgttaacagcctgtgggcccttagcaccttctgtaacttcgtattccacttcctgaccttcttcaagtgtcttgaatccttccatattcagtcctgaataatgaacgaatacatcatgaccctcagcgtcagaaatgaaaccgtagcctttttggttgttaaaccattttacagtacctttcatgattatacctccataaaaattattaaatcgtgcaatttataaaagtattctatgaattgcactgttgtcagattagcatatattgataaagacgtcaatgaatttaaggaatgtttttgtgtttttatacaaaaaagtaatctacttgacgaatgaacggcaaacgtgtaaagtattattgttcatactaataaaggtttaaaagggttggaaaactatgattacattgactgggaaaaaaatatcagaaggaattgcaatcggaaaactttccttttataagcgggatacaaaagagattcgcagaatctatgtaaaagatgtagaaaaagaggttatgcgttttcagaaagcaaggcagaaagcgttgcaggaactgagggatctgtatgattcggcttctaaggaagtaggtgaagcgaatgcagctatatttgagatgcagcagatgatccttgaagatcaggaaatcatcaggcagattacaaatattatcgtagagcataagttgaatgcagagtatgctgtaaaaaatgcggtggaaaatgtactggcaagtgcggcaaaaagtaataaaagttatgtacagggacacgaagcagatattaaagatgtgtcgacaagggtacttcggattcttgcaagggcatggaaagataagatgctgacagatgaaccgtttatactggcagccggtgaattatatccaagtgaggcagtaaagcttgataagagcaagattcttgggtttgttaccagatacggaacaattaattctcatacggcagtgcttgcaagaacaaaaggaattccatctgtgatcggactgggagagtctttaaagaaagaatacgaaggcaagaccattattatcgatggttttgagggaaaagtatatatcgaacctgattatacaacgatttcaaagatgaaacagagacaagatgagaatcatacgcaggtacagagtctggaacgtctgaagggaaaagaaaatattacgcagagcggacaaaaaattgatgtgtgcgcgaatatcggaagcagggaagacattgaaagcgttctgcgcagtgatgcgggtggaatcggattattcagaagtgaatttatttatatggaaaatggtccgaaacttccgacagaagaacagcagtttcaggtatatcgtctggcagcagaagcgatgggaatgaaaaaggttgtgatccgtacagcagatctgggcggtgaaaagacagcagagtgtctggacctgggagaagagaataatcctgagatgggatacaggggaatccgtgtgtcactggataaagacgagatattcaagacgcagttacgtgcaattttacgtgcatctgcttatggaaagatgtctattatgttcccgatggttacagatgtaaaagaagtacagcaggcaaaactgcttctggaaaagataaaaaaagagttaaaagatgagaagattccgtttaatgaagaaatacagatcggagttatgattgaaacaccggcagcggttatgataagcggtgaactggcacgggaggctgattttttcagtataggaacgaatgatctgacgcagcttacactgggaatggacagaacaaattctaaactggatcatttttataatccgcatcatccggcattgcttaaaatgatacgtattattgcgaataatgtacatctggagggaaaaacaatcagcatatgtggtgatctggcagcagatctggacatgacagaacaattcctgcagatgggaatcgatgagttatccgtagcaccaaatcaggtacttgctttaagaaaaaaaataagagagatacagtaattttgttgtcgttatcttattttttgagagtataaggaggaaaagagaaacatgttggaaaaattatttaagctccgtgagaacggaaccgatgccaaaacagaggttatggcaggtatcactacgttcatgactatggcgtacatacttgcagtcaatccgagtatcctgtctgcaacagggatggattccggtgcaatctttacatcgacagcgctggctgcaatgatcggtacattcttgatggcgttcttcgccaattacccgttcgcactggcacctggaatgggactgaatgcatactttgcctatactgttgttcttggaatgggttataagtgggaagttgcattaacggcagtatttgtagaaggtatcgttttcatcgtactttcacttacgaatatccgtgaggcaatcttcaatgcaattccgaagaatctgaagtcggcagtaagtgtcggtatcggattattcattgcatttatcggacttcagaatgcgaatatcgtagtaggaggttctacacttctgcagttattctccattgatggatataacagtgccaaaggtgtggaagcttctatgagtaacgtaggaatcacggtcattcttgcactgatcggtgtgggaattacaggaattctggtaataaagaatgtaaagggaaatatcttatggggaatcctgattacatggattcttggaatcatctgtcagatggcgggtatctatgtagcgaatccagaaattggattctacagcctgcttccggatttcagcaagggattcacaattccaagcatcatgccggtatttggaaagcttgacttcagcggaatattctctttgaactttatcgttgtcatctttgcattcttatttgtagatatgtttgatacgatcggaacactgatcggtgtgtctacaaaggcaggtatgttagatgaggagggacgtcttccgaatatcaaaggtgcgctgatggcagatgcggttgcaacaaccgttggagcagtgcttggaacaacaacgactacgacatttgtagagagtgcatccggtgtatccgaaggaggaagaacgggactgacttctgcaacgacagctattttattcggcctgtcactgttcctgtcaccaatcttccttgcaattccttcatttgcaacagcaccggccctgatcgtggttggattctacatgctgacaaatgtgacacacattgattttgatgatttttcagaggcactgccatgctacatctgtattctggctatgccattcttctacagcatttcagaaggtatctctatgggagttatctcttatgtgatcctgaatctgatgactggaaaagcaaaagaaaagaagatcagcgcattaatgtatgtacttacggtattattcatattgaaatatgtctttctgtaaaatataatagaaagaggagaacgaaaagagatcggagtttccggtctcttttctggcctgtcaggcattttacagggactgccgatgggaagatccgaaaggcttatgaaggagaactaaagtatgaatttacttacgatggagcatattacgaaggcttatactgaccgtgtccttctgaatgatgttgcattcagcatcaatgagaatgaaaagatcggtgtgatcggaattaacggaatgggaaaatctacgcttttaaaagtggcagccggaatagaaccatacgatgaaggtaagatcagtataggaaatcaggtcaagatctgttatctgccgcagacaccggaatttgaagagggaacaacggtgttgcgtgcggcaatcgcagacaatgtgaatgagctgaatcagtggacaattgaagcagatgccagatccatgctgaacaagcttggcttctatgactatgacgagaaagtagagcatatgtccggcggtcagaagaagagaattgcactggtcaatgcattgcttacaccggcagatatcctggtactggatgaaccgaccaaccacctggataatgcgatgtctgagtggctggaggaatatctgatcggatttcgcggggcaatcctgatggttacccatgaccgttattttctggatcgtgtggcaaccaggatcgtggaagtagatcaggggaaattatacagctaccctggaaattattcggagtttgtcaagttaaaagcagaacgtcaagatatggcactggcgacagaaagaaagagaaagagtcttctgcgtacagaactcgaatggctgggaagaggtgcaagagccagaagtacgaagcagaaagcacacattgaccgcatcaaggcaatgcaggagatcaaggacattcaggaagaaaagaaagtggtactggattccgtagcgtcccgtatgggaaataagacaatcgagcttcagaacatcagtaaatcttatggagcaagaaagctgatcgatgactacagttacattttcctaaaaaatgacagaatcggaatcatcggaccgaatggctgtggaaagacgacacttcttaagattattaatgggattgtaaaaccggataatggcacgatcgagattgggcagacgatccggatcggatatttctctcaggagaatgaatatatggatgcatccatgaaagtgattgattatgtcaaagaagtgggagaatatgttacgacatcagacggaaagatcacggcatcccagatgctggagcgcttcttatttgacggagccatgcagtggtcaaagattgagaagctttccgggggagaaaagagaagactgtacctgatgcgtgttttgatgagtgcaccgaatgtactgatcctggatgagccgaccaacgatctggatatccagacgctgacgatcctggaagattatctggatcactttgacggaattatcatcacggtatcacatgaccgttatttcctggatcgtattgtgaaccgtatcttctcatttgaaggagacggaaaagtacgacagttcgagggtggttattcggattatctgatccgcaaagaactggaaggtctggatacagagatgtcattgaaaggacatgctgccgggacagaggaacagccgaagaaggcagagagctcttcgaaagacacctggaaacagcgggaaccaaagctgaaattcacattcaaagagcagcgggagttcgagtcgatcgatgatgacattgcaaaactggaagaaaagattgagacactggatgcacagattgcagccaatgcgactaattcggtgaaattgcgggaacttatggagaaaaaagaagagactgagaatgcactggatgagaagatggaccgatgggtatatctgaatgatttaaatgaaaagattcaaaatacaaagcaacagggataaacaaggagaaaaagtatatgaactggacaagagaaagactgaaaacaaatggtaagattgcatttaagaagaattactgggcatgtgtggctgtagcagtgatcatgggaatcatcacgggacttagcagcataagcggaggaagaaccggaagtggtgcttcacagaacagtctgtatgggaatgatgggttttcattctcatatcattacggatggggattcccatttgcagggctggcaattgcaatggctgcgattatattaatgattgtaatatgggcactgaagatattcgtgggaaatcttctggaagtaggtggaaaacgtttcttcgtattgaataagacagagaatccaacggttggaacgatgtttgatgcattccgttccggacattatgtgaatattgtactgaccatgttcttaagagaactttttacatccttatggacattactgctggtgattccaggaatcgtgaagcattatgaatacctgatgattccttacattcttgcagagaatccgggaatggacagaaaagaagcattccagatcagtaagcgtatgatggacggacagaagatggagacgtttattctggatctgtcattccttggatgggatattcttacggttatcacatgtggaatggtggggattttctacgcttctccatacaagcaggcaacttttgcagagttatatgcatttaataaagcaaaagcatatgaggaaggatatatcagataatggcgatcaacaaatcaatgaggcgggtattaaaagcgctgtccttcgacggcattgaagtggaggcttcaagacacctggcgaatttaaaagcaattgatccgatgaagatatttcataagacgattgactataagatttataacggcaatcatcagatccctgtaaggatattccttccaggggaaaagatggaggatgatctgccggtatttctgttctttcacgggggaggatgggtaacggaaagtattgataattatgaaagaatctgtgcccgtcttgcttcggcaacagatcatatcgttgtatcggtagagtaccggctggcgccggagtatccatttcccattggtttttacgattgttatatggcggcaaaggctatgtacacgaaccagtttatcttgaatacagatccggataagattacactgatcggagacagtgccggtgggaatctggcagcagctgtttcactgatggcaagagatcagggagaattcctgccgaagagacagatactgatctatcctgcggtaaataatgattacagtgaagagtccccatatttgtcggtaagacgttacgggacggaatatcttctgactgcgggaaagatgcgggattatattaatttctatgcatcggcagaagaagataagaaaagtaaatatcttgcacctctcatggagaccgattacagcaaccagccggatacactgatcttaacggcggaatgtgatcctctcagagatgagggggaagagtatggaagaaggttaaaagaagcgggcaataaggtggaggtgcacagaatacaggatgcacttcacggattctttgcactgggagtaaaatattaccatgtacaggagagctttgctattattaaccgtttcctgagcggctatacatctgatgaaaacagccggaaggttagtcctgcaaacgaagaataaagcgggaaagtaaagggggaggagaaagccggtgtttgagcaaaaacgtgcttactggagaagtctggataatgcggcaaagttattttccgcagccagcagcccgaaagataccagagtgttccggttctattgtgagctgaaagaagaagtaaaagaagagatattacaggaagctctgaatcagacgatacaaaagtatcccgtatttttgtcggttatgagaaaggggcttttctggcattatctggagaaaagtgaattaagaccggtggtaagggaagaatataaagaaccttgcagcagcctgtatgtacgggataaaaagacacttttatttgaagtgacatattataaaaaacggatcaattttgaagtattccatgcgctgacagatggaaccggtgcaacagaattcctaagagaactggtgaagaattatctgtatctgatccacgaagaagatctggagccggtggagctgtcaaaccagtatctgacggtaaaagatcaggaagatgacagtttcagccgatattatgatccggattttccaagaaagaaaaagaaaaagatcagggcggttcagatcaaaaagggtggaaaaggatatgaagagctgcagatcaatgaagcttccatgtcggtaaaagaactgctggggattgccagagaaaagaaagtctccatgtcggtgctcctgacggctgcatttatctgtgcaatccatgaagaaatgagccggatgcaggagaagaagccggttatcctgatggttccggtgaatttaagaaagatttttccatcggattcgatgctgaatttcttcggttatatagagccggggtatcagttcggagggggaaaagattcttttgaagatgtactggaggcagtaaagttatattttcaggagaatctgtccaaagagcatatggcaggacggatgaatgaactgattgcaatagaaaagcataagatcttaaaatgggcaccgctggaactgaaaaaccgctgtatccgtgcgggtgccaagatggcggagcaggaagtaaccgccgtgctttcgaacatgagtgtggtaaagatgccggaagattatgcgcaatatattgaaaagtttggcgtgtatacaagtacgaaccggacagaattatgtatctgttcttttcaagatacgttatcacttggctttacatcgagatacgacagcacgaatatccagcggaatttctaccggatattgaaagaactgggggcttcggtcaaagtggcagaaccggatttcccggaggatgcaagaccaaattatgaaggaaagaaagtattacagatctttacattttgctgtattgcagcgatcgtgatcagtatgatgacggatatcattatatcgcccggcatgcactggtcggtgttcgtggcagccgggtgtgcgacgatgtggcttacgatggcagtcggttatgtgaaacggttcaatctgctgaagaatgcggcatggcagcttctgatcatgtcagggatctgtgtattgtgggatctcggaaccggatggagaggctggtctgtgaatatcggaattccggatatctgcctgctgatccaggttgtaatgttgatcatatcaagaatacgttccctgtcaccgagagaatatatgatctattatgtgatggccgctgtctattcgatgattcttccattgattcttttagtgacaggagtaatccattacaagactccatcggttatctgtatcgggtgcagttttctgctgttgatcggattaattttattcaaacgaaaagaatttaaagaagaaatgcataaaaaattccacgttggctgatactgatagaaaggaaaatattggtggctttgtgcggtgcagggttgattttgagagaaattcttaaaaaaatcttacatccgtgaaatggttgtgatataataggtatatcaagagtttatgtcagcgcgtttacaaatttcataatacgataccagaaaagatggcgtgcagttcgatataacttcggattgtgcgctcttttagcgttgtcatacatctgcaggttaccatgagagaagtgttagaacaggaggcagaaatgttcaaaataggagattatgtggcgcattataaggagggcgtctgcgaagtagtaaatattggcaagattgacatgggcagttcggacaaagagtattatacgttaaaaccggtatatgatgcaggtggaacggtatacacaccagtcgataataagcgggatcagatcagaaaactgatcacaaaagaagaggcggagaatctgatcaaagagatgccaaagatcgatatcattggtgtgacaaatgaaaaacagcgggaaggaatgtacaagaacgcattgttacacaatcagtgccgggagtggatctcactgatcaagacttcatatggaagaaataagaagagattactggcgggaaaaaagacgatcaacgttgatgagagatatatgtccagcgccgagaagttcctgtatggagaactggcagtggtgatggagattccgagagataaagtcagcggttatgtgaaagagcacctggatgcggagctggcataggcgaatataggaagaaaaagaaaactgctgatagcaggttcttacgaatatatgataatttaaaaataatgctgcagaacgaagaaaagtttgcagcattattttttataccatagtaagcaagagaagttgccggttttgtagatatcggagtacagaattaattggttttctgggtatcgttgcttgcttttgctgccttttctgcataagtagtagttacgagatccttgtaaggtgcgcgttccttaagctcgcctgcttcttctaagatatcctgaagaagatcaaagctttcctgccggaagatcagatcttttttccatgtatcctgctcataatagcgggaaatgatggttgtgatcgtatccagtgtggtctctttgaactgaggagcgattgcctgggcaatgtcttccggtgtgtgggatgccacgtagtccatacctttttgcagtgcattggtgaatccctgaacgacttccggatgtttgttgatgtaactcttctttgcagagaaagcagtgtacggaacatagccgctgtccgttccaagagaggcgacaacgtatcccttaccctgtttttcaagattggttgcaccaggttcgaattctacggtgaagtcgtaatcggatttgtcttctgcgaaggcagccgcagtagaaccgaaatcaatattctggtcgatggtgagatctgtagccggatcgatatggttctggtttaagatatactcaaataccatttcaggcatgccgccttttctaccgccgatgaccttcttgcctttcagatcttcccatttgaaatccttaatatcttccctggcaaccaggaagttcccggcgcgctgggtgagctgggcaaagtttacaacataatcattcgccccctcgttatatgtgtagatagaagcttccgaacccataaagccgatgtcggcagttccggagaggacggccgtcatagttttgtcggctccgaaaccagtcacaagagaaaggtcgattccttcgttggcaaaatatcccttttcgattgccacatacatcggagcatagaagatggagtgtgctacttcatttaatgtaacaggagtcagttcctgttttttagtacttgtggattttgaagtttttgctgttttgtctgatgcggattccgatttgtcagcagatgtacatgcaaaaagtgaagtgacagatagtgtaaggagtaaaagaagtgcagtgatacgctttttcataagatcctcccggtgaaatatattctatggtttatagtatattcggaaagaagaaaacagtgatggaaaatcgagaaaatatatcaatagacaggatttgttttccgtcatattgacacgaaacatacagcagaatatacattataacaatgttatataacattgttacgaaacaggaggtacaagtgtctaaacaggtaaaaggtgtttctgaaaagatagaagcatgtgcaaaaaaagaatttctggagaaaggatatgtggatgcatcgctcagaacgatcgcagaggaagcggatacaacgacaggttcgatttattcgcgttacggtggaaaagaaggattattttccgctatcgtagaaccggtagcgagagaatttacagagaagtttgtaagtgtgcaggagagattcgatgcgacagacccggataagcaggcaaaacagggcgaagttaccgcactgatcggtccatccttctggatgaagcaacggcgtctctggatgtagataacgagacgatgatacaggaatccctgtcacgactgattaagaataagacggtcatgatcattgcacacagaatgagaacagtcacagatgcggataagattgtggtattgaaagacggtgtagttgcggaaagtggtacgccggaagaattgaagaagaaagacggcatctatgcgaatatgatgaagacacagctaatggcagcagactggagcctgtagatagcagaaataccagtggggacagaaaaaaagctactttttcacgtctccactggtcttttttgttttattttctatgaattagtggtaaaatattgaagtattaacgaaaaaatgagaggaaaaaagagtatgaaacaaaaaaatagctttagcgggcagattggcttcgtatttgcagcagccggaagcgcagtcggcgtgggaaacctctggcgttttccatatctggcagcaaaagacgggggaggacttttcctgattatctatcttgtgctggtattgacggttggttttgtgttactgactacagatatagcaattggccgcaagacgggaaaaagcgcaatctatgcctatgaatcaatgagaaaaaaatggaaatttcttggagtgatcacattcctggttccggtattgatcatgacttattacgcggtgattggtggatggatcttaagatatatcgtgatctatcttacaagttcaggaaagcaggcagtagcagataactgctttacttcatttatctcttctccgtcttccgtatggtatggactgatctttatgttcctgactgcactgatcgtatataacggagtagaaaagggaattgaacgagtttccaaatttatcatgccggttctgttgatcatggtaattggaatcgcaattttctcacttacattaaagactacgttggatgacggaacggtccgtacaggattacagggactgaaggtgtatatgaaaccggatctgacaggaatcacgattggacgtttccttcagatcacactggatgcaatgagtcagttgttcttttcactgagtgtatctatgggaattatgattacatatggatcttatgtaaagaaagatgtagatctgaacaaagcggtatcgcagattgaaattatggatacaggagttgcattccttgccggtgttatgatcattccggcagtattcgtattctccggactggatggtatgtcagcaggcccgggactgatgtttgtctcattgccgaaagtattctactgtatgggagtggtaggaagaatcatcggaattctgttcttcgtgctggcaggatttgcggcgttaacatcttgcatctcggtactggaatccattaccgcaaactgtatggaattattccacacagagcgtaagaagacgaccagagtgttatcggtgatctacctgatcgcaacagcagtgatcgcacttggatacagcgtcttctatgtagaagttgcacttccaaacggaagtacgggacagcttctggatatcatggactatatcagtaatagctttatgatgccgtttatctcactgttatcagcaatcttgatcggctggatcatgaaaccgtcatggattgcggaggaaatggaactgaatggcaaaaaattcaagcgtaaaaagttatataatgtgatgatgcgttatattatgccagtcattatgatgattttattcctgcagtcaacaggtgtgttgaatctgattatgaaataagaatatatagaaatcgtagtttgaaaggaagtcggagaaatctggcttctttttgtaatctgagtatctggaaaagtcaatgaaaggtgttgggcgtatggattttactttttgctattaactaataattgcaattgtgtatagttttatgttaaaatatattaaataatagtaatttggtttaataaagtatgcgatattataacaggaggggcaatggggaagggttggtactagcaaattaggagagttataatgctattttgattaatcagaataagaatcagaaagaacggatgaaattattacgacagttaacggtacaacaattaaatacattggaagcggcaagcatgaataatctgaataagatcggaaacggagatagataagaattaactaaaaatgaaataaaaagtaaaaatatataaccaaaaggagagtagactaacatgaatacaaaagcagaacatgcagcagaattacaccagagaggatgcaactgcgcccaggcagtagcctgtacattttgcaaagaattcggaatcagtgaagacgatatgtttcgtatcgcagaaggttttggtctgggtatgggcgtgatggagatgtgtggtgcattgtctggaatggcaatgatcatcggccttgataacagtcagggaggcacagaagaaggatccagaaccaaaggggatacatataagaagatccgaagcaaagtagaaaaattcaaagagaaaaatggttcctgcatctgccgggagttaaaaggtgtggagacaggaaaagttctctgcagttgtccacagtgtatcgcagatgccgtagctttgacagaagaatatctggcagagcagggaaaataaagtctggataaaataaagctcagggaaaatgaaatccgggaaaagtcaatgcataatggagaaaagaaatgcgattaaaaaatatattaattgttgtaaaagatatcgaacattccaaacaattctatcatgacctgttcggactgaatacaattcttgacaatgacggcaatgtgatattaacggaaggcctggtacttcaggacgaaaagatatggaaagaagttctgaataaggatattattccggaaaatcatgccagtgagttatatttcgaagaaccggatatcgaagcatttgccagaaagcttgaaaagttgtatcctaatattaggtatgtcaaccggctgatgacacacagctgggggcagaaggtggtccgtttctatgatccggatggcaatctgatcgaagtaggaacaccgatgtaaagaattttggaatgataacggaggataagaaagatgggagttcaatcaattgatgcagaagatgatcagttcgcatatcgttacgatacacagttactgatcgagagaagagacgaagatctggatgaagatgatatcgcagattatattacagaacattttgaaggtaacagtctgatcgcagcaggtgatgaagatctggtgaagattcattttcatacgaatgagccgtggaagatactggagtattgcaattctgttggagaaatctttgatatcgttgtagaagatatgatccgtcaggcgaatggacagcagggataacaaagaaagcattgaaagaagattcttccctgaaattccatcttcagaacgccaaagatcacggagtgacacagaaagagatcgcagcagtgatcacacacgtgggattctatgcaggatggccgaaggcatgggcagtagaagttccgggagaagagacttccaatgaatggtgcgaggcagtatccgatgaagaatacggaaaattgaaataatcctaccgaagtataaaaaatgtgataaaatggttgcagtcagggaactgattgcagccatttttttggtatcgccatgtgttcgtaaggagctgccagtggcaggtcatgtagatacaaaagtatgcaagaaaagttgctggcggtcgattctgaggattaacagagacagaatatgaaaggacaagaatcatgaagataacatcagttgcagtattaggtgcaggtgcggtaggttcctatgtgatctggggacttgcggaccgtgaagatataaagcttggtgtgatcgccgaaggagagagaaaggaaagactgagccgtcagggctgtgcgatcaacggaaaggtctatcatccggaggtgtggacaccagaggaagcagaaaatgtggatttcctgatcgtttcgttaaaatacggcgcattgccgggagcattggaaagcattaaaaaagtggttggaaaagataccattgtaatgagcctgatgaatggcgtggacagcgaagagatcattgcagaacagattggaaagtcacacattcttccggctgtgattaaagtagcgtcacacagagaagcggacggatatcatttcgatccggagacaacacttgggatcatcttcggtgaatatgaagccccatacgaaagtgaaagggtaaaggcggtgaaagaactgtttgccggtacgggaatccattaccgctcaacggaatatgcaatagaagaagtgtggtgtaaattccgtctgaatgtctgcaataatctgccacaggcaatcctgggagcaggtgttggctgttaccgggacagtgaacatatgaaagcaattcagaatggtttgaaaaaagaactggaagcaattgcagaagcgaaaggaattgacatcagtaaagcggacagaatgtccggacggggaagtgcggttccgccaatggcccgttattccacattacaggatctggatgcaggacgtcatacggagatcgatatgttttccggagcgctgatgcgtatgggaaaagaactggggattccaacaccatataatgaatatacctatcatatgctcaaagcactggaagaaaagaatgacggcagatttgcctatacaggagaggaagaaccaacctggtcgaaataaaaagtttggggaagagatatgttaaaaaaagaagaaatgattacacttttaaagaatgacgtagttccggcacttggctgcacggaaccggtatgtgtagcactgtgcgcagcaaatgcagggaaaatgacggaaaataagatccgttcgatagaagtggaagtaaatgcaggaatctataaaaatggaatgtcggcaggaatcccaggctgtgattatgtaggacttccatatgcagcagcactgggagcatatcttaagaatccggaaaaagggctggaacttctggaagatatcacaccggaaattctggaacagatgaaagaactgtgcggtatggctgctgtatccgtgaagattaaagagcaggagcagggattgtatgtgaaatgtaagatcaagacagaagcagatatgatcacatcggtcatcagaggaacacatacgaatcttgtatatctggagaaaaatggaaagattatatatgaaaaaaatcaggaaaacggacaggcatcagataatgctctgattgagacgttgaaacagatgacaattgcacagatccgccaggttgcagatacagcttcagaggaagaattacatttcctgatggatggagtggaaatgaatgaaagactggcagcttattccgaaaataagaaagtcggagtaggaattgcagatacgcttcggagtgaaaaaggttcagaggtgttgaagaatgatctgctgaccagaattatgctgaaagtaagttcggcagccgagagccgtctggacggctgtccgctgccgacgatgagcagttccggtgcgggaacaaaaggtctggtagtgatcctgccggtcagtgaagcagcagacgcattgggagtgtcaatggagaaaaaggtgcgtgcgcttgcaattgctcacctggtgaaccgttatatcaatgcttatataggaaagctgtcaccgatgtgctcctgtgtcatggcatcatcaacggctgcatccgtaggaattgcttacctgctgggaggcagtgacgaacagcttgggtatgcggtgcgaaatatgtccgggacggtaacgggaatgatctgtgacggcggaaaggtcggctgtgcaatgaaggttgcaacaggatcatcggcagccctgctttgtgcgctgacggccgttcatgatgcgccgcttcgtgtgagtgacggtatctgtgcagagacatcggaagactgtatccgtcatatggcacagatcggtaatcaggggatggcgcagacggataaagaaatcattcatattatggagcagaaaaagtgatgacagaaaaagtgaaacaacagcatatgttttcaaataaaatgatcgccggtattctgataccggtcgttctggaacagttattgaattcaattatgggaacggcagatacgatgatggtaagtaatattggatctgcagctatctcggcagtatcgctggtggactctatcaatattcttgtgatacaggcattttcggcactggcagcaggaggagcaattgtctgttcacagtatatcggacaacagaataaaaagatggcgaatgaatctgcaagacaggtgttattcatcatcacggccatctcgatcgtagtcagtgtgttatgtctgggatttaagaaaccgcttttgcgcctgatttttggttcagtagaagctgacgttatgagagcctcagagacatatttcttttatacagctatttcatttccgttcatagcggcatatgattcggcggcatccatttttcgcgcacaggagaatacgaagggtccaatgctcatttccatgatatcgaatgcgatgaatattgttggaaatgcaattatgatctggattttccatatgggagttgcaggtgcggcaatttctacactggtctcccgtatattctgtgcagtggtagtattgattcaattaagaaaagaccgacagccaattgtggtaagagattacctgaaaatccgtccggactgggcgatgatccggagaatactcgggattggaattccgtccggtgtggaaaacagtatgttccagcttggaaaactggcaatacagtctaccgtatcaacattaggtacaactgcaatcgcagcccaggcaatgacaaatattctggagaatctgaatggaatggcggcaatcggagttggcgtagggttgatgacaattgtaggtcagtgtatgggagcggacagaaaagacgaggcggtctattacataaaaaaattaagtgtgatcgcagaagtggcaatcattgtaagctgcctgctggtatttgcattgatcaggcctgtgacagttcttggcggcatggagcctgcaagtgcaaagatgtgtttccatatggtaacctggattacgcttgtgaagccgattgtatggacgctggcatttgttccggcatacggacttcgtgcggcgggagacgtaaaattttctatgatcacgtcgtgtctggtcatgtggctgtgccgattttgtctgtgcgtgatactgatccgatttctgggatttggaccgatgggcgtctggatcggtatgtttgccgactggacagtgcgtgcagtaatatttacatggagattccatagcagaagatggttaaggtataaggtgatttaaagatgaagtatgtattaaagaaggcagatcagacagaggtagaagaaatattcagtctgtatctgaagcggattcagtggatgaacgaaaaaaagaatcgatcagtggaacaacaatggttatctgcacaattttgtaaccgacctgactgaaaaaggggctggaagagaaatcataaaagctgtcgaagcactggcagtaaatgatcacaaagaaagagtgcacctggactgttccatcgacaatccatttcttaatcagtattatgaatcaatggggtatgagatggcaggaacctgcaaagatgggggggatgaaggcaataggcgtgaaaatatatggcattactatagagaaaaataaatcataataaagaaaatcaaaggagaaaaaaatgaacgaattatatgaattgattgaaaagaaaataaaggaatcgggatatccacgtcagatttccggagcagatgtatatgatgatatctgtgatcagattgacggaaaagaaaatgggacatatctgctgctttcgaaatttgaggatgatgtgatatttgaatatcatattactattaatgacgaggattttaatctgggagttctgacaatgaaaacaccggaaggaacattcgaagtagattttgataagtaggaaaaatatcaaaaacaaaagataagttggaacattattaaaaatttagggtaatacaatggaaaaatctttagaaccttcaattattacggtgcttggaacagtggtattccgtgtaatctggcttttgactgtctttaagatggttccgacatatgagatgctgatgaatgtgtatgttgcatcgtggatatttaccggagggttgttgttactcatctatctgaaacacatgaggaagctggagaagaaagcaataaagtagttgtagaattttagtttgttattattatggcggttatcaccagtcggtgatagccgccataatgcataaaacaaaaaaatcagactctgtcgtgattgatctcgcgatagaataaccgtgcaatctcatcctgtttatccgtctgaccaagaatccacatcagtttcgcaacaatggattctgtcgtcatatcatcggacttaaggattcctttatgattattgaattttttcccaacctgatatacaccaagatcacagccttcttccggcacctgtgtggtgacggcgatcgtcttgccggaatccacccaggagaagattgccttttcaaaggaatcatcatattccgggataccgccgataccaaaggtttccaggatgatagcatcatagtgaccactcagtagatcaaaaatctcagctttgacttccggtgtcagcttcagcacaaagacacggtcattaagacttgcgtaagatttcagatcttgcggagcagggcgtttttccgtatagtaacggatgatgcggctgtcacggatgatggcaagttccgggaagttcatactgtcaaaggcatcaaaacttctggtgcgctgcttgcgtccacgtgttccggcgacaacttttccgttaaatacaatgcagacattgcaggaaagatcgtcggcagcatacagaatgctctggaacagattgatcttcgcatcggtataaggattggccatcggtttctgggaaccggtgagtacaatcggctttacactgtcctgaatgagataagacagggcagcggcggtgtatgccatggtgtctgttccatgcaggatgacaaagccgtcgtaatgattataattttccatgatcgcatcgcggatcatcagccactggcgcgggcgcatgttcgtgctgtcgatattcataagctgaagtatttccagatgacagatatctttgataccaggtacgctggctgccagttcttcgcctgttacagccggtgtcagtccaagatccccttctttggatgcaatcgtaccaccggttgctatcattagtatgtttttcatgatcagttacctctcaataattcattgttttaaactcttctataagattagtcgtgattaagaggcatgtcaaggaaaaaagaaatttagacaatggattttagaggattttatccggtgatatcagatgtatcttcaggggcttcgttgttgtcttttatatcggaagccggaggaacaggaggaagaaacgggtacaattcttcataagaatcaagttctgcttcggaaagaggggcagatggaataaggccggtacaatcctgggacgaggcggcaccggaaagatagtcgtaagaatcaatcagttcctgattggtcagaggtcttaagcgggtcgattgttttacatctttcataataaaaactccttacattcattagaaatacgaataaataattgatatttaataaaaaatgatgaaaatatgctttccagaatagaataggtggaaaaaaagaaaattatactgtataatatttcctgttgcaaaattgtagagcgttaaagctagaaagaatgaaagcaacaatcagatgcagattagaaaataaagaagcctgaataaaaagaactaaaaataaaaggaaaggagttaaaaagatgagagttgagattgacactcatacacatacgctggcaagcggacatgcatataatacaatgaatgaaacctgctaagaaaagtcgctggaaggctgaaaaagggctggatgagatgtgtgccgatacatggagatggcagtcacagaatccaaacggatatgaatcataaatcataaaaatgaacaccggatgatgggaaatacttaacagaacgttaaggatttcccgtctttctttttcaggggataaatggtataatatccacgtatgtaaagagcagtggatgatcagatcactgacaggcactgcaaaaggagtgagaaatactcacacacagaggcgagaatcatggaaaagaagaatgaaaaaggaaaagtgcagctcaaaggacaactcaaactttacatccagtggccggctattatgtcccttcttctcatagcaatggatttgtgggtttataagctggatcacagagcgggaatcctgatggccgtatttgtagttgtatatatcattatggtgggtggactgtatttttacagtaagaacatcattatgaaagacctggtagagtttgctgcacagtatggcattgttcagaatacattgctgagagaactgtcgattccttatgcaatcctgttggatgatggaaaagcgatctggatgaatgatgaatttgaagcaatcctgggaggtaaacccaagggagaagcttatatcagcaaatacattcctgaattgaaccggagtatatttccaaaagaggaccaacagacggtcacaatggaagtgtattatgatgacaaagagtatcaggcagagatccggagagtatcagtagaaggatttagtgatacagaacagcttatggagctgccaaaggaaaaagaatattttatagctgtatatcttcaggatgttacggaatttaaccgtattatccgagagaacgaagagcagaggatggttgccgggctggtttacattgataactatgatgaagtgatcgacagtgtggaagaagtcagacagtcacttctgatggcactggtagaccgtaagatcaaccagtatattgcgaaggttgacggaatcgttaagaaactggagaatgataaatattttatcatcatccggaaatcttacttcaaacagctggaagaagataagttctccctgctggacgatgtaaaatccgtaaatatcggaaatggaatcccggcgacattaagtatcggacttggactgagttctgattcttatgcgcagagttacaactatgcacgtgttgcgattgatcttgcgcttgcaagaggcggcgatcaggcagttatcaaggactgtaacggtgtgacttattatggtggcaaacgtgaacagacagcaaagaatacccgtgtaaaggcgcgtgtaaaagcagaggcactgcgtgaatttatcacggtcaaagataagatctttgttatgggacataagctgacagacgtggatgcgttcggtgcggcaatgggaatctaccgtgcggcactggctttggaaaaacgtgcttatattgtaattaatgaagtatctgcatcgctcagaccattatatgaattattcgaacaggattcgaattacccggatgatctgttcctgacatcgtcacaggcgatgaatatggcggatgagaattcgatggttgtagtagtagatacgaaccgtccgatgatgacagaatgtgaggaacttctgaagacgaccaagacgatcgtggttctggatcatcacagacagagcagtgataatatcgacaatgcgctgctgtcttatattgaaccgtatgcatcatcggcatgtgagatggtatcagaagtattgcagtatatcgtagacggaatcaagattccaaagattgaggcgagcagcctgtatgccggtatcatgatcgataccaacaactttgtgaatagtaccggagtccgtacttttgaagcagcggcattcttaagaagatgcggtgcagatatcacattggtaagaaaattattccgtgatgacatggaatcttacagagcgaaagcagagatcatcagcagcgcggaggtttatcataataaatttgccatcgcaagaggtgtggatcttcacatcgaaagcccgacgatcatcggggcacaggcagcaaatgaactgctggatatcagtgagatcaaggcatcatttgtattaaccgaatataatggaagaatatacgtcagcgcacgttcgatcgatgaggtcaatgtacagatcatcatggaacgtctgggcggaggcggtcacatgaacgcttcgggagcgcagttcaaccatacggatatggatgaagcggtagcttgcttaaaacaggtgattgacgagatgatagaaggaggagacttgtaatgaaagtaattttgacagaagacgtaaagtcacttggtaaaaaaggagagatcgtaaacgtcagcgacggatacgcaagaaactttatcttaaagaaaaataaaggtgtagaagccaacggaaagaacttaaatgacctgaagttaaagaaagccaacgacgataagattgcacagcagcagtatgaagatgcgcaggaacttggcaagaagatcgaagcaggtaagatcgaagttgcgatcaagatgggagaaggcggcaaagcattcggttccgtatcttcaaaagagatcgcagaagaggttaaaaagcagatggatcttacgatcgacaagaagaaagtacagttaaaagaagcaatcagaacactgggaacacataatgtaccggttaagttgcatccaaaggtaacagcagagctgaaagttgttgtaaaagaagaagcataggaggaattcaggcgtggaagaagcactcatcaaacgagtcatgccacacagcatcgaagcagaacagtctgtggtcggcgccatgcttatggataaagatgccatcaccactgcaggagaaatcatcagtggtgatgatttttatcaggcgtcatacggagtgatctttgattcgatgatcgaactgttcaatgaaggaaaaccggtcgatctgatcaccttgcaggaaagactgaaggaaaaggacgtaccggcggagattgccagtctggaatttgtcagagacctggtgacagcagtgccgacttctgcgaacgtgaaatattacgcacagatcgtggcagataagtcgttaatgcgtaagatgattaaactgaacgaatcaattgaaaatatgtgctatgcgggaaaagagccggtagagtcgattatggaacagacagagaaatccatgtttcagttattacagagacgtacgaccggtgattacgtaccgatcaaacaggttgttttaaatgcattagataagattgagaaggcgtctaagagtaaaggaaccgttacgggaataccgacgggattcattgatctggattataaactttccggatttcagccgtcagattttattctgatcgcagcccgtccatctatgggaaaaacggcgtttgtattaaacattgcgcagtatatggcatttaagaagaataaagcagtagcaatcttcagtctggagatgtcaaaagaacagctggtgaaccgactgttttctctggagtcccaggtagatgcccagtccctaagaaccggtaatatgaaagattccgactgggagaaactgatagaaggagctgggattatcggtcagtcgaagctgatcattgatgatactccgggtatctctatctcagaactcagatcgaaatgcagaaagtacaaactggaacacggacttgatattatcatcattgactacctgcagttgatgaccggaagtgtgggaagaagttcggagtccagacagcaggaagtctcagacatttcccgacagttaaagggacttgccagagagctgaatgtgccggtagtatccctgtcacagttaagccgtgcggtagaaagccgtccggataaaagaccgatgctttcggaccttcgtgaatccggagccatcgagcaggatgcggacgtggtaatgttcatttatcgagacgaatactacaataaagattcagagttcaaaaaacaggcagaaataattatcgcaaaacaaagaaacggcccggtagggaccgttaatctggcttggcttggcgaatatacaaagtttgccaacttaagcagacaggaagattctttttaatttcttaactggaccggtttcggccgatgctttccgaaaggattgctgctggcggatcaactgatccagttttttgaattctaattcttcatggcgttcttttgcatccagaagaaaggacatctcctgactgaacattgccatgagaacttcgttgttattctgcagcatgcgttttaactgtaactgttctctggtccgtctgatatcgggaatcagtgcttttaaatcagagagagaaactccctgatcataaagatcccggatacaggcatacagtctggcatcatctctggtctcacgttttatctgttctaaagtattcatatgatttcccatgttagatccccccttatcttataatacttgtcccttatgggtaaatgtatcatagcacaggaaagatcaccgaattcgtcagaatccgtcgagagaaataaatttattaaaaaagaaataatatacaaaatatcaaaacaaaaaaatgcacgatacaaaatgtaccgtgcattcttatcttacttattctgcgttattaaccttcagaaattgctcctactggacactgagcagcacaagcgccacaatctacacaagcgtcagcatcgatctcataatgatctgctccctgagcgatagctcctactggacattcagcttcgcaagatccgcagcttacacattcatcaccaattacgtgtgccatagtatgtaccctcctttgagattaaatattctagacataatccaattcgttgtctctgttcctataataatacaaaaaataaaaataaacaagggaatagaatgtttttttagaaatacataaaagtttagttatagctaacttgtgttagaaaaagctatcacaataaaggggaaaaaagtatttctacagaaatataaaagtcatagaggaaaattaagaaaaatttcaacaatttttcaccgttttggtgtatagtatatggtgctgaaaaaatataagaaaaaaatataatcaaaagttagaagtattaagtataagtagaaatgataccagatataggagagaggaaaatgaagaaaaacagaatcattgccatgctgctgggtacagcactgcttgtatgtggatgtcagcagacatcaaaagcaaccgatgaagaaaaaaagattgagtcagaaaagaatacaactaagacagaagaaaacgcatatcaggggaaattagatctgatcactccggcggcatataataatacggacggattaaagctgaaaaaaggcgattatatttccattatcggaaaagcgaacggagcacagtactgggatgaagtgaaaaaaggtgtagcgcaggctgcggaagatattaatacaaatcttgggtatacaggaaaagataaggtgaaagtagcatttaatgcaccggatacagcagataatgtcgatgaccaggtaaatcttctggatgaagaactggacagatatccggtcgcagtgggcatttcgatcgtagacctgcaggcatgccaggtgcaattcgatcttgcaacagacagtgagattccgatcgtaacttttgattccggatcagattatcagggtgtggctgcagatgtatccacagacaatgtagctgcaggaaaggaagcggcacagagacttgcggaagagatgggcgacagcggagaagcggtgctgttcattcaggattccaaatcacaggcagctcttcagagagaaaaagctgtaacagaagaattgaaagcaaatcatccgaatatttcagtggtcaatgtataccacatggatgaactgagcaatatgcagaagacagtatccgatgagatcaatgccggaacctaccgaccaaaagacagtgaacttccggagggacagctcacaggagaagatgttgtaacagcagacagtatcactgaagatcaggtagttgattatatccttgcaaaacatccaaatattacaggctgctttgctgcaaacggggattccgtaaaacttgcagtcgatggtctggaaagaaataaaatggagaaaaaagtgaaagtcatcggcttcgacgccaacgatgatgagattcaggatctgaaagacggtaaagttaacggactgatcgtacagaacccatttggcatgggatatgcaaccgttgtggctgcagcaagggcttctctgaatatgggaaatgaggctgtggttaatacgggatatacatgggtgacgaaaaagaatctgaagacggatgaggtgcagaagattctgtatagtaagtaggaaaatttaatgtatcatggcggcttaccccggttctgaataaaagtatagaagggattgctgtgcggattcaatcatggggaacatctaaagcaaaaaaatcggcctaaaagcagccggtcaaaaatcataactcgctgatcgctcagacaaatgatttttaaccggctaacggccgatttttttacttaagaagttccaactctttctcatggactgagaggtcacaatgataaattagccagcaaccttcggaagtgaaaaggagaattcggttccgactccttccgtactcaccacggtaatattctccccatgtgcctgaattgcttctttcacgatcgcaagtccaagtccggtacctttcttatcttttccacgggagaggtcactcttgtaaaagcgttcccagattttcccaagcgctgatcttggaatacccataccgttatcttttacagaggtatatactttttctccgcggtctgtcgtctcaatcgtgacgatggaatccggatcactgaatttaatcgcattgtccagcaggttgtataagacttgctggatttttcgtttgtcagcattgacgttcaggtgttttgttgcgaagaccaattcgatggaaatcttcttctgtgtgcagacaccttcgaaagatgccgctacatgcttgatcatctcgtgaatatcgaatacttcccggttgagaagcaggtgattggtgtcaaattcatttaacgtcagaagatcctgtgtcagatctgtcaggcgttctgtttcgaataagatgatcttcaggtatttttcatgtaattctggtgggatggttccgtctgtcatggcttccacataacctttgatggaggtaagtggagaacgaaaatcatgagacacatttgccacaaatttcttctgataatcttccatatccctcagctgagaggacatgtagttcagtgatgcggacagataacccatctcatcttcagttgtgacaggaatctcatattccaggttaccggaagcatattgggttgctgcttcggtaatcttatgaagcggacggtacacaaggaaatggaacgccagcaggataatgaacgaaagcaggaagattacgatgaatgtaatatatacaccacgcatcagtgtgtctgtcatggtatccacaacagaggtatactggtggatcatcagatatccttttggaaaatacccgtaagttaccggtacagtgacagtgatcacatcattgtcaaaatatccgtgataatcaccagtctgtgaacgatcgcttccggattccgccgggtcgaaatctttaatggaatcaggcgcggacgggtagttcccggactgtgcagaaaggattacttttccatcttttgaaacgaaccagactgcagcgtcaagctgtgtctctattccggataagatcatctgtgcgtcagattctgttaatccgccggaaaaataaccgggaagatagtcgttggcaaccatcgtagcttcccggtacatactgttacttacgcggttaaaaatcggcgtactgaccaagttctctgtcagtgttgcggctgtaaaaaggcttaagaatccgaacacaatatagataaatataaattttaaatataatgtacttttcatgatattaacctgctgttattttacttcaaatttataaccgattccccatacagtgctgagactccagccattgtgatccttgatcttctcgcggagacgtttgatgtgcacatcgacggtacgggtatcgccgatatattcatagccccagatctgatccagtaactgctctcttgtgaatacctggttcggagaggatgcgaggaaatagagaagttccagttcctttggcggcatctcgaccgtatggccgtcaacaatgacggagtaattggtaaggttgatctcaattcccgggtattcgacacattttcccttatctgcctgaggagtctccggtttggagccgacctgatagcggcgtaagactgcttttacacgtgcaaccagctctttggcatcaaatggtttcataatgtaatcatctgcaccgagctccaggccaagtaccttgtcgaatacttcacccttggcggacagcatgataattggagtgttagatctcgtacggatctcgcgacagacctgatatccgtcgataccaggcagcatgagatctaaaagaatcaggttcggtttgtaagtgtcaaaggcaaccagtgcccgttcgccatcgtggaccatcatagtgtcaaagcattcttttgtcagatataatgagaccagttcagcgatattttcatcgtcatcgacgatcagtattttctgtttgttcatagatgtatactcctcccgtatatagatgcatttatctatactgattcactttaaagtttccccttatactatcccttattttaacttttatttcagctcagcgatcgttacgccggcgtcaccttcgccaaatgcgccaaggcggaatgatttgacatgtttctgccgtttcagatatttatggataccggctcttaaagctccggttcctttaccgtgaacgattcttacggaactgaggtgtgcaagcgaggcgtcgtccagatatttatccagctcggcgatcgcttcatcgactgttttaccaagaaggttgatttcaggactgatcgcaagagatttgcccatcttgactttgcctttaccggtctgacgggttcttttggcaaatgaatatgccggtgcttcatcgatgatctccagatcggaaatattaactgtggaacgtaagattcccatctgtacggtgacatttcccttggaatccggaagtgaagtgacagatccggtcaggttcatactcagtaccttgacagattctccaagtttgaaatcacttggtttgtaagccttttttggtttcttggtatctgtcttcatggaattctgtgtcgcgttcatcttcttgcggagacgctcacgttccttttccatctcggcaacggagatattggctttgccgaatttgtggaaattacgcatggtctcatcggctgtttccttggcatcggccaggatctcatgagccttttcattggcctcgcggatgatacggtcacgctgttcttctaatttatcacgtttctgacgggtctcttcttcgagacgtgccagttcacgtttgtagtgttcgatctcttcctgctctttccggatggtacgtttacttgtctccagatcggttaacaggtcttcgaaggattcatcctgttcggtcagatgtgtcttggcatcttcgatgatataatccggaagtccgagttttcctgcgatggcaaatgcattactctttcccggaataccgatcagaaggcggtaagtcggactgagcgtctctacatcgaattcacaacaggcattttcaacgcccggtgtggaaagtgcgaagactttcagttcgctgtagtgtgtcgttgccatggtacggatgcctctctggtgcagatagcttaagatggcgatcgcaagagcagcaccttcggtagggtcggttcctgcattcaactcatcgaacagtaccagagaatgttcgtctacatgctttaagaacgaaacgatattcgtcatatgagaagagaaggtactgaggctctgctcgatactctgctcatctccgatatcggcatatacattttcaaaaattgccagttccgaacggtccagcgcagggatatgaagtcctgcctgacccatcagggtaaataatccgaccgtctttaacgaaacggtcttaccgccggtgttcggtccggttacgatcagaaggtcgaaggtatcaccgagtgtgacggtgatcggaacgactttcttcttatctaacagcggatggcgaccctcacggatatggatccggccttctgtattgaagattggcttgcttgcgttcatgttgattgcgagatttcctcttgcaaatatgaaatccagctccgtcatgactttgtagtcggtgcggatggagtcgatatattctgcaacatcggcacttaagcgtgcaaggatcacctggatctcttcctgctctttgccgtaaagctcttttaaatcattattcagttttacaacagacatcggttcgatgaacagggtagaacctgtggcagactggtcatggatcagaccggatacctggcttctgtattcggctttgactgggatacagtagcggtccccgcgcatggtgatgatcgcatcctgcagataggtacggagcgaaccgttgaccagagaagataatgtagaatgtactttatcattgatctggttcatggaacggcggatctgctttaatgtactgctggcatcatcactgatctcatcttcgtcaataatgcatcggcggatctcagtgcttaccagtgtcagtggctcgatctgctggaagaaagcatccagacagtcttctgcatcgtccacagtctcgtgacggccgtaagctttgatctgccctgcattttccagaagcttacagatacgcaaaagctctccgcttccgagcgcggcaccgacttccagacgctttaaggattccccgaccggattacagcttccgaaagaaggacgtcccttcttaatgatacgggtaaatgcggcggcagtctgttcttgtgcggcttcgatatccgtgatggatgtcatcggttttaatctcttgcagcgttccttgccgccaaaagaagttgcctgctctattaagatgtcaataattttatgatattctaatttagttaatgtttttttattcatgtttctcacctgaacttattctatgttactgttcatacagtagctgtagtcagtacctattctaccttatttggacgataaagaaaaggataaatattgaacattcccattccatacggtatactataaaaaggattgcaaaggagacgaaaaagctgatggatgagcagaaacctctggaaaataagcagggagaacctggggaaaaaacagaaaaatcagaatattcatttatgcaggagacgatcaaagacgagaacagccgtggaaaaaagtgccgtaaagacctgcttcgtatggcggggcttggagtggtattcggtgtgtgtgcctgcattagtttttctgcgctcaaaccatggcttgataagaagtttcccggagattcacaagaggtagtgataccgaaagagaaagaagaagataatacagaagaaaaaaaagcggataccagtaacaatacggaacagacgctggatattgacaattacagagaacttcagaaagcaatgaacgacgtagccacagaggccggaaaatccgtggtagagatcataggtgtatccggagagcaggactggacagacgagtcttacgataataaaaacagtgtgtccggactgatcatcgctgataatgggcaggagcttctggtatatggaaagacttctatattaaaagatgcaaaagagatccatattagattctcggatggcaatacagaacaggcatctgtgaagaagaaagatgaaagtctcggatttgcgatctatgctgtgtcgggaagcagcattgaacagtcaacatggacgcagatcagtaccgccaaacttggcagttccaattctgtacagaaaggggacgccgtggcagtgcttggaaagccatttggctatgcaggagcggtcggatttggaacgattgcgaacagcagaaatgaactggatgcagatgacggaagttatcagctcctttgcactgatattggtgcggcagaagacggaacaggtgtgatcgttaatttgtcgggagaagtagtcggaattattgatcagagtatttctgataatagcagtaaaaggctggtaaccgggtatggaatttcgggcttaaaatcagagattgaattgttgtctaacggacaggcggtgccgtatgtcggtattcgtggactggatgtgacggcagagatcgaagctcagggaattccaaatggagtatacgtccagacagtagagccggattctccggcaatggcagcaggaatccagagcggggatataatcacagaggctgcaggcaagaagatatcgtcgctggcggtctatcagagtgtgatgcgtgaccagaaaagcggcagcaagataagactcaaaggacagagacagggatccggcggttatgtggatatttcatttgacgtgacagtcggaagcaaggagtaggcttgccggatgcttccggggagatgtttcgatcgttgtaaaatatagaataatattaatatagaatatagaaagaggaaataagatgagatatatcaacacccttcacgaaggagaaacaatcagaaatgtatatttgtgcaaaggaaagcgttctgcggagaccagaaacggaagaccatatgataatctgatccttcaggataagaccgggacacttgacgggaaagtatgggatccgaattccggcggaatcgcagattatgatgagatggattttattgaagtatatggtgaaatcatcagctataataacaatctgcagcttaacattaagcagatccgtaaagcacaggagggtgaatatatcgccgccgattatatgccgacaacggagaagagtacagatggcatgtatgaggaactgcttggatatattaagaaagtagagaaccagtatctgagacaggtgctggagtattattttgtaaaagacgagacatttatccgtaatttcaagggacattccgctgcgaagacggttcatcatggattcgccggaggacttctggaacatacattaagtgttgtgaagttctgtgactatatggtgggagcatatccgatcctgaataaggacctgcttttcacagcagcgatctgccacgatatcggaaagacgaaggaattatcttccttcccggaaaatgattacacagatgaaggacagcttctgggacatattgtaatcggtgtggagatgatcggagatgcagtccgcaatatcccggacttcccggagaaacttgcgaatgaattaaaacactgtatcgttgcacatcacggagaactggaatacggttcaccgaagaaaccggcacttgccgaggcgatggcactgaatcttgcagacaatgcagatgccaagatgcagacactgacagagttattcaaagataaaaaaggaaatgactggctgggatataaccgcctgtttgaatcaaatatcagaaagacagttatctaatgatgcagaagaatgaaatagtaaaggtaaaaatagaagatatcggagtcggaggagaaggcatcggcaaggtggatggatacacgttgtttatcaaagatgccatcatcggggatgttgtagaggcgaaagtaatgaaagcaaagaagaattacggctatgcccgcctgatgaatgtcctgactccatcaaaagaccgtgtggaagagccggtctgtccgatggcaagaaaatgcggcggctgtcagatccaggagatgaagtatccggcacagcttgcatttaaagaatctaaggtacgcggcaatctggagcggatcggagaagttccgggtgaacttctggatcagatcatgcatccggctgtcggcatggacggagaaggaatgcagccgttccgctaccggaataaggcgcagttcccgatcggaacagataaagacggcagagtgatcgctggattctatgccggaagaacacacagcattatcgagaatacagactgcgcgcttggtgtggaagttaacgaagagatcctgaactgtattctggacttcatggaagaattcaaaattccggcatacgatgaagtgaagcataaagggctggtacgccatgtactgctccgttacggattcaagacagatgaaatcatggtatgtctggtcatcaatggaaagacgattccgcactgtcatgatctggtcggacggctacgtcagattccgggtatgacaagcatcactctcagtacgaacacagcgaagacgaatgtgatcatgggcgatacgatccgccttctgtggggacaggagttcatcacagactatatcggtgagatcaagtaccagatatctccgctgtcattctaccaggtgaatccggtccagacagagaaattatacggactggcattagactatgcaggcctgaccggcaatgaggcggtgtgggacctgtactgtggaatcggaacgatttccctgttccttgcaaagaaagcaaagcaggtatatggcgtggagatcgtaccgcaggccattgacgatgcgaagaataatgcaaagatcaatgacattacgaatgcggaattctatgtaggtaaggcagaagaagtcctgccggagtattacaaagaatatgaaaagacacataacggagagaccgcacacgcagatgtgatcgtggtcgatccgccgagaaaaggctgtgaggaatccctgcttcagacgatcgtggatatgcagccggagaaagttgtgtatgtaagctgcgacagtgcgacacttgcgcgggatgtgaagttcttaagagcgaatgggtatgagcttaaggatgtgacgcctgtggatcagtttccgcatacggtgcatgtggaagtcgtgtgttgtctacatcgggtgaattcgtagaagtccttaattttaggcactttgcgaggcatatgagtttcacaccaacaggcaaacagggcaagaaaaagcagattatgaatggcatcgaagtgtcagtagtattgcatctggtatgaggaaatacattcggacagaattaacattttttattcaatagcatagagaaaagtcaaaaggacgcttgttttcagaacttctggaagatgagtgtccttttcttttatctcaaggcaaaggagaagataaaaaatggcaaggaagaaagaaatttgtggtggaaatcacgccttattattatgaacacggcgtttgcctggaagaccatgatgggacttctgctcatctttatacaatcttaatttcaaaacaaacttacttacgcccatttaatacaaataaagatagaataaaggaaatataaaaatgaaattaagattatggggatatagttatgcaacagacaaacagatcaagacatcgacatataacatcatttcaagtgattagtttagggtttttatccgtgattctcttaggcagtctgcttttgatgctgccgattgctacaaaaagcggtcagtgtacctcctttttggatgctttgtttaccgcaacttctgcggtttgtgtgacgggactggttgttaatgatacggcaacctactggtctttatttggccaaggagttattttactgctgattcaaatcggaggtatgggaattattacgattgctattgcgattgctgttgtttccggacgcaaaatcgggttgatgcagcgaagtaccatgcaagaggcaatttcggctccaacggtgggtggtattgtgcggagaacgcaatttattattcggactactattcttatcgaaatcattggtgcggttcttttagcccctgttttttgcagggactttgggttttggaaaggaatatggtatgcactgttccattctatttctgctttttgcaatgcaggatttgatctaatcggtataagaacccctttttcctcgttgacctcttattctgtacagccgattgtaaatcttgtaattatgatgctgattattgcaggaggtattggattccttacctgggaggatataaagaatcataaatggcattttaaaaaataccggatgcaaagcaaggtgatttttatggtaacaggaatattgatattcttaccggctctttactttttttattttgagttttcaaatgtgcctcttacagaaagagtatgggtttctttgtttcaatccgttacgccgagaacagcaggattcaatacggcagatttgactttactcagtgaagttgggcaaatgcttatcattatgctgatgctcatcggtggctcgcctggttccactgcaggtggtatgaaaacgacaactcttgcagttctcgtttcatcggcattatctgtatttagaaaaaaggaacacaccaattttttcggcagacaaattccggatgacactatcagaaatgcagctacaatttttttgatgtatatcgttttattccttgtcggaggaatggtaattagcagaacagaagatattccacttatgaccgctttgtttgagacggcgtcggcaatcgggacggtggggttatcgttgggaataactcctgacctggggcttgtttcccatataatcttgatttgcctgatgttttttggcagagtgggaggattgaccttgatttttgctaccatttctgaaaaaaagcctaacggttcaaaatatcctcaggaaaaaattacagtaggttaaggagaataaaaaaatgaaatcaatattaattatcggtctgggaagattcggacggcacattgctatgaaattagatgaattgcatcatcatgtgatggcggtagataaagaagatactcgagttgatgctgtacttccctttgtaactaacgctcagattggggatgcgactaatgaggattttttaggttcgcttggtgttgggaactttgatgtttgtattgtggctatcggagataactttcagaattcattggaagtaacgtcccttttgaaggaactcggtgcaaaaatggtggtgtctcgtgccgctcgtgatgttcatgcaaaatttcttttacgaaacggcgcagatgaaattgtttatcccgaaaggcagcttgccgattgggttgcgatccgttatagtgctgatcatattttcgattacatagaactagatgaagaacatgcaatctttgaaatatctataccgggagaatggataggaaaaacaatcggtcagttggatatacgaaaaaaatataatgtcaatattatggcgctgaaaacaaatgatattatgaatttgaaaataagttccgatacgcagttgttaaaggacagtaccatgcttgttcttggggagacgaaacatattcaaaaatgttttcatatttaatttttgaaagaagttggtgatatgaaagactttgttttacttatagtggtattggcagcatttatttatggttattttcttatggaaaagctggataaatttctcaaggaaaatcaatcccaaaaacttatttcagattctaagctcaggattggatttgaaacacctgcaatcatagattctattgcagatctattagaacaattttcaagcgaatacccaaactatgagctggacctgttctacggttctgtaagtgaaataataaatgggctgggaaataataaacttgattttggctttatcatagaaaattctaacgatattttgaaagatgagtattgttccttatcccttcaaataaagcaaagtgtcattactccaggctctatagacattgcggtacatcccatcaacacgattgagaaaccagcgagagtgatatggcaaaatgacattaattgtatgaagggtctatttgtcgaaaaattgcgtgatttttcggagcgttttctgctttcggctacacgcccgaatggaaaaaaagaagaaaaggtggtataatctgtatgcgattttaatgtcagtgctaaaatgcttttctgaaatttacgtattattctatataatgtttttgtataaggagatgaccgtatgagtgaaagcagacacaatccggatcagttattaaaggaaatccaagctgatgaagaaaaccgtaataaaggacatttgaaaatctttttcggatatgcagctggtgtgggtaaaacctacgccatgttagaagcagctcatatggaaaaacagcagggaattgacgtggtagccggttatgtagaaacccacgcacgtcccaaaacagcagctcttttgaatggcttagaagttcttcctacaagagaagttttttataatggtatgatactggacgaattcgacattggcatggcgttgaaaagaaaaccacagcttatccttgtagatgaacttgcgcatacgaatgccgaaggatgccgtcatgcaaaacggtatcaggacattaaggaacttttgaatgcagggattgatgtctatacgactgtcaatgttcagcatattgaaagcctttgtgatacagttgcatccattacggaaattgttgtacgggaacgcatcccggattctatttttgataatgcagatcaggttgaattaatagatattgaaccacaggatttgatcaaccgtttgaatacaggaaatgtatacagacagacacaggaaaaacaggcagtaggaaatttttttacaatagaaaatttgacagctctccgggagatttcactgcggcgatgtgcggaccgggtgaatatcctcacagaaaatacccgcataaaaaatcatggagattatcacacaggcgaacatattcttgtatgtctatcttcttctccatccaatgcgaaaattatccgtaccgccgcaaaaatggcttctgcttttaaaggggagtttacggctctatttgtagaaaccccagatttttcggtgatgagcgaggaaaatgtaaaacgcctgcgttcaaatatttgtcttgctgagcagcttggggcaaaaatagaaacagtttacggagaagatgttccgtttcagattgcggaatttactcgtttgtccggtgtgtcaaagattgtgatcggacgtagttctgctacaaaacggcatttgctcagcaaaccgaccctgacagaaaaattgattgattatgcccctaacctggatgtgcatattattccggatacggtttctaatgcggcagtgtatcagttaagagggggcaggaaaaagaatcatatcgtattctctgtcactgatacattaaaatctactgcgattctgattttatccagtttagtcggaatgattttccggaaatttggatttgacgaagcaaatatcattactgtttttgttttaggtattcttgtcaccgctgtcatcacgaaacatcagatatacagcctaattttctcgattgtaagtgttttggtctttaatttcctgtttacggaacctcaatttaccttgcaggcgtatgatcagggttatcctgttacctttattatcatgtttttggcggcatttttaaccggttctcttgctatacggattaaaaaccaagcaaaacaggcggcacaatctgcttaccgtaccaaagtgttatttgatacaaaccagctattgcaacaggcaaaagataaaaatgaaattgtatctgcaacttcaaatcagctcattaaactcttgggaaaagatatcgttttttatttagctgatggagaagtgttggatacgccgcatattttttctgtaactgaagaaaatttggaatcgtgtatttccgaaaatgaaaaggccgttgccggctgggtattgaaaaacaataaacgtgccggagctacaacaggaacgctttccaatgcaaaatgcctgtaccttgctgttcgcagcagcagtatggtatatggagttattggaatcgtgatgggggaaatacctcttgatccatttgaaaacagtattctactatccattctcggagaatgtgccctggctttggaaaacgagaaaaatgcccgtgagaaacaggaggcggccattcttgcaaaaaatgaacagttgcgagcgaacctgctgcgtgctatttcacatgatttgaggacaccgctgacatccatttccggtaatgccagcaatcttttgtccaacagcgattcttttgataatgatacaaaaaagcagctgtacatggatatttatgatgattccatgtggctgattaaccttgtagaaaacttgctggctgtaacccggattgaagaaggacggttgaatctccgtataacggaagatttgatggatgacgtgatcacagaagcgttacatcatattaatcgaaagagtgaagaacatcatatttccgttgaaagcaaagaagaatttcttcttgcaaaaatggatgcaaagcttattgttcaggtaatcatcaatattgttgataatgctatcaaatatacacctaaaaactctcatattgttattcggacagaaaagcggggaaaacaagcaatcgtatctatatcggatgacggaaacggaattgctgacgaaataaagccacggatattcgacatgttctatagcggtgcaaatcaaattgcagacagccgccgaagtttaggactcggattatctttgtgcaagtccattattaacgcccacggcggagaacttactgtttcagataatctgccgcacggaacagtatttacatttacattaccggcaggggaggtcaaagtatatgaataagtcactaatattagttgtagaagatgacacatctgtcagaaatttaattacaacaaccttaaaagcacacgaataccgatatctgacggcacccgatggtcaatcggcaattttagaaacatcttcacacaatcctgacattgttttacttgatttaggacttcctgatatagatggtgttgagattattaaaaaaatccgtacttggtcaaacatgccaatcatcgtaatcagtgctcgcagtgaagataccgataaaattgatgcgttggatgctggcgcagatgattatttaacaaagccattttctgttgaggaactgcttgccagactacgagtcacgcaaaggaggttatcgatgatgcaaaaagtatcccctgccgaagcggttgtttttgtaaacggaaaacttcgtgtagattatgctgcaggttgtgcttatttgaatgaagaagagttgcatttaacacctattgaatataagttgctttgcctgttgacaagaaatataggaaaagttctgacccatactttccttacgcaaagcatttggggaagtagttgggataatgatattgcttcccttcgtgtgtttatggcaacacttcgtaaaaaaatcgagaaagaaccgaactctccacaatatatccaaacacacattggcgtggggtatcggatgctgaaagttgattgaacttcataacaccatagttaaagttggaatataagcgtgactgtttcaaattgggaaaacggaaaaagttatcctgatttgcaaatccttgtaagcatgagtaatcaattgttatgacgccgactaaatggattgaacagaatataaaatgtggcctttttcttttattccatatagctcgcactcagtactctttaagataaagtagaaatagtgcaattttcgcatgatattatacaagaattacatagaaatatatcgtattattgatatggtattcttgaattgtatgtgaggagaaacctatggaaactgaaagaaaaacattaacacagctatctgtgccaatatgtttagaaactttattttatatgctttcaggcatggttgatacgcttatgttatcatctgtgagcgaccaggctgtaggagcagtgggaacagccaatacatatataggtgtttttattatcatgtttggggttatatcatcgggtatgatagctgttatgtcacaaaatatcggagctggaagaccggggatgcatatcaggcaaggcaacttggacttatattcaatgtactgataggtatcgtaatgtctgtcgttcttgctactttttctggtgggatacttagaatcgtaagtattgctccggctttgcttgagccggctgaaatatatcttagaattgttggcggcacatgttttttaaatgcactgattcctattttctccagttatttgagagtgtttggatatacaaaacattctttgataggaactgttgttggaaatgttctcaatataatacttaattcagtatttttatttgcattcaactggggtgtgatgggagttgctgttgccacggttatttcgagagttgtaaatcttattattgtagccggcatgggggctgtacttataaaagcaaagcagagtcctgagcggattacatcaagaaagatatttgcacagattgttaagattggttttccttctgcacttgaaacagcactttacaacatcgcaatgacatttattgtgtgttttatgaatcagatggatgtggatggaatgaatgttacggcacgctcatatgctgtacagattgcaaatttctcgtattgtgtgggagctgcccttgctcaggcaaatgcaattatgacaggctggagaattggagcaaaagagtttgaggaatgtaacagggggacgagaaaagctgcgatatacggtatcatcacagcgacatgcttttccgtgacctttgcatttgccggacattttatagtgcatatatttactgatgatacacagatgataaatcttgtggtaaagttgttaatagtagatatatttcttgaatttggaagggtaacaaaccttgtatatggacaggcattaaaaacgagtggagacgcacttttcccggttatactaggtgcgatatttatgtatttgtttgcagttggcggaacctattttctcggaatacacatgggacttctggctgtaggagcatatattgctatggcaggtgacgaatgtgcgagagcagtgggaatggtacttagatggaagagtggaaaatggaagagtaaaggtcttgtagaagtataggagagggtatgtactttgaattaaaggaaaataaaccacatggtacaaaggatgatccgtttagtacatatcatataaaaaatgaaggacgatcatttcagataccggttcattggcatgatgaactggaaattatatatgtaaaaatcggttttttgactgtaagtatatcaggagaaaattatattggaacccccggggatgcttttgtagtgttgccgggcaatctgcatttcatgggttcacagactggtacagtggattattttactttcctttttccgttaaaatatatatctttttgcataaatgacatgttggacgagaaattactggagccgttaaaaaatggtcatctgatgataagtccacaagtaaaagatacagccaaagaactgtgtgagcagttggttgaaatatatgtggcaaaaaacaagaaaacggagtcccaaataactgctcagataaaaacaaaaataattcttttacaatttattcttgaaatgtgggagaagggctttgtaatcgaaaatgataaaagcgggagaaatacgatagaaaaagaaatgatttcatatatacagcagaattttatggaaaagatatcattaaaagaatttggtgagcagtttcatctttcggaaaaatatatatcgcgatattttaaggaacattttcatattacactttcgcaatatataacacatttacgattagagcatgcaaaacagctgttacaagatacggatactcctgttacagagattgcaatgcagagtggatatcagaatgtaagctattttatcagaagcttcaaaaaaacatatggagtttctccgttaaaatatagaaaaaaataagccaggtatatggttagaaaggagagaatatctcggtagaatcagaaaatctgccggagagatatcgagaatgagtatgggaaataagaataaatggtggagaaatgcagttgtatatcagatttatccgaaaagctttcaagattcggatggagatggaattggtgatattccaggaattatcagcagactggattatttgaaaaaacttggaatagatgcaatctggctctcaccggtgtatcgttcgccacaggatgacaatggatacgatatttcagattatcaggatattgagccgatgttcggaacaatggaagatatggaacagttatttgcggaggcaaagaaacgcggaattcgaattatgatggatcttgtgttgaatcatacttctgatgaacacagatggtttttggaggcaaagaaaagtaaagacaatccgtatcatgattattatgtgtggcgtgacggagaagagggtgtttatccaaatgatatgaattctgcgttcggaggaccggcatgggagtgggttccagaactggggcagtattattttcatcagttttcagtgaaacagccggatctgaactgggagaatccgaaagtgagaagagaactctatgatatgattctctggtggatggaaaaaggtgcaggtggatttcgtctggatgtgatcgatcagattgcaaaagagccggatcttaagattacaaataatggaccaaagctgcatgaatttctgcgtgaattaagcagggaaacatttcagaagggtgatatgatcactgttggagaagcctggggagcaacaccggaaattgcaaagaaatatagcaatccggatggaagtgaattttccatggttttccagtttgagcatattatgcttgatcaggaagaaggaaaggaaaaatgggatactattccattgaatatggttaagctgaaaaaatgccttgcgaagtggcagaatactttatatcagacaggatggaacagcctgttcatgaataaccatgatctgcccagaatcgtatcgcgctggggaaatgacggaaaatacagaaaagagtcggcaaaaatgctggcgacaatgcttcatggaatgcagggaactccttacatttaccagggagaagagctgggaatgacgaatgtgcagtttgacagcattgaggaatatgaagatattgagacattgaatatgtacaaagagcgtctggaaaaaggatatcagccagaagaaatcatgcattctatttacgcaagaagccgtgataatgcccgcactccaatgcagtggagcggagagaagaacggaggcttcacaacaggagaaccatggtttgccgtgaatccaaattataccagaatcaatgccaaagaggcacaggaagatgaaaattcggtattttactattatcagaagctgattcgtttaagaaaagaaaatccagtatttgtggatggaaaatttgaccttcttctgccggaagatgagaagatttttacctatacgagaacagatgagtatacaaagatgctggtatgtgcaaactttacggatgaggaagttagctgcccattgcttgatgagtggaaagatggggaagtctggattcggaattatgaggatgacagagaaggaaatgtattgcgtccatatgaggcggtgataattggaactgctgcgaatattgtgaaagcaggatagttcccgtttgacagagtaattgaggagtacaacataaccggagaatctgggataaaactgaagcaataaagatacttgcaaaatcccttcacaccctgtatcatttcaaaaggaacaaaacgaaatgacaaggagtggtttcattggcaaagatcaggaaaaaaccaaagaagagcataaataaaaatataaataaaaaatcgttcacacaaagcacacctaatatcgcagaaaaactcgacaacgagatggttgcgttcctggatacggaattcttaacatcccagataaaaggaggaccgccggccaagcttgtgtcggttgggtttgtagtctgtgggaagaattttgaagaagtaacaagatttcattcctatatttatgcagaagacaaactgcatgaccggttccaggagatgaccggtattgagagaaaagatctcttaagtgccccggattatgaacttgtgatggaagaagtcgcagagcagttggaagcgtgggaggtatcaaggatctatgtatggggaccggataagtacgtgatacagagagatctcctggaataccgcaaggatgcatcgaaacggaccaaaaagatcgtgaaccgtatccttcgtatgatcaaagatatagaagacatctattcggcgaaactggatctgcagagtgccgggatcggaagtctgaagatcctttgtgggctgggaacggaagtcagccataatgcactggatgatgcggtagatctgaagaatatcattaagcacattgatctggaaggatgttcggagcatatgttgcagatcatgaaaaagtatacggctgagaaggaagtgtactacagacagcgcagattccgtgaaaaatgggaagatgtatcagaagaaattcagaaaaagacgcttggtctgctgaaagagcttggaaaggtagatacagtagaagcaagagcactcagggatgaccttatggtcatgtgtaccggagaagccatatcatttccgacattggaagaatatatccggaaagaagaaaaagaataaaataaaaagaatatttatcggttgacctgtatatcatggtaataaaataaaaagaagtattacaaactttaatagtgaaataacacaaaataatactaaaacaaagattacattttagaaatagtgtaaaaaagaagaaactaattcgtgataaaaacgataaatcaacaaaattaacagacaattttaagcaaaattgcagattgacggaaatcagtaaaacagttagaataatcacaagttcataaagaacaagacagacaaaggcgtcgcggttcacatacctgcggcgccttttcgtatgctaaagcttttttgtatttcatttatctgaaatataagaaactattttctaattcatcccgggtaggttagaaggtctgtcggacggaaatgcaagggcgcattacaaaaatcatttgtaatgtgcccttacattttcagttattagaggatccaaagaaaactgtcttatagcagatttcaaagatggaacagtaaggaggaccacaattatgaaaaagaaattagcagcagttatgatatgtgcagcaatggtggcaatgcttggcgtaggatgtggaagtaaatcaagtgatgattcttcatccaaatccgagaccaagaaaactctgacagaagatgatatcaaagacagcatgaaaggtgtaaaactgaaagtcggaacaaccggacttttcggaccattttcttattatgatgaagatggaaagacattgataggatatgatctggatctgataaatgatttgcaggacctgttaggatttgagattgacgggggtattcaggcaatggattattcggctctcacaacctcacttgcagaaaacaaactggatatgggagctgcagcactttgtgcaacagatgaaagaaaagaagttatgaagttctcagatatctattgtgattccggccaggttgttatggtaaataaatcaaatgacgaaggaatcaagagtgttgatgacctgaaaggcaagaaagtagccgtagaaaaaggaacagcttctcatacatatgcatctaagaacctttctgatgcagatctggaagtacatgatacgatcacaaccgcatacgaatctctggaacagaagaaagtagatgcagttattcaggacggacctggagcaaacttctatattaagacaacaccggacagcaatcttgaagtcgtaggagatgaattcaatcagggccaggcaccatattgtgtagcaatttccaaagaatgcaaatattacgatgagatcaatgcggctgtaaaagtactgatcaaaaatggtacaacagatgaattgtatgcaaaatggtgcgaatagatcttatggatcatatttgaaatgaacgaaaaaaacaacagataggaagagatagtatatggatatgaaatttttggatgttttactcccgatgatgtttgaaggattaaaactaacagtattgatcgctgtagtaggtatcggtatcggattcctgatcggaagtctctgtggatatttattacagtctaagtataaagtaggaaaagcaatcgctgaggtttacatttggattatcagagcaacaccacttatggtgcaggcactttacggatatttcgtaattccaaaattggtcggcgtagatatcagcagtacaatcgtcggaattggggttattgcattgaactccggagcatttatttctgagatcgtcaaaggagcactgatgggaattgattcgggacagaaagaagcaggagcatctcttggacttaccagttcacagacgatgctccacttgatcattcctccggcattcaaatccgccttaccggccctctttaaccagtttattacatccgtaaaggatacggcattattatcagccattgcggtaaatgagatcacacatcaggcacaggcatatgcagctttaagctttaaagcaattcctacatataccgcactggcagtgttttacttgataatactttctatattgataattgttcagaaacagattgaaagaaaaatgaggtgattgatatgattaaaattagccatttatcaaagaaatttggaaacctggaagtattaaaagatatcaaccttgatatcgaggaaggagaagttgtatgtatcatcggaccatccggttccggaaaaagtaccttccttcgatgcatcaaccagttggagagtccatccggaggaattgtagaatacgaaggaaagaacctgttagataagaaatgtgacattcgtaaattccgtgaagaggttggtatggtatttcagagattcaatctgttcccattaaagacggttgcggagaatgttatgatggcaccggttcttaccaaacatatgaacaaagaagaagcgcatgaaaaagcgctggaacttttggataaagtcggattaaaagataaagcagatgtctatccaagtacactttccggaggacagcagcagcgagttgccatagcaagagcacttgcaatggaaccgaaagcacttctttttgatgaaccgacatccgcactggatccggaactggtaggtgatgtactggatgttatgaaatccctggcaaaagaaggaatgacgatgatcgttgtgacacatgagatgggatttgcccgtgatgtggcagacagagttatcttcatggctgatggatatgtagtagaagaaggaaagccagaacgcatctttacagctccgaaagagagaagaacacagaccttcctgtcacgtattcttccggcaactgcatagaatacagattagaaaatcaataacagagacgcttaactaaatattgatatactatccttttgaggggcagggtgacctgcccttctcggtttgtgtataataaaattctatattgacagaaaaaaatagttgtactaacatccaagtagttgatggtacaattatttttgagcgcgttgtactggagatcaaagaatgaaagacgtgcaggattttcagattgaatggagggtcttgcttgccgtgacaatttcgggcctgatctataatctgggacttcttgcgggtccctggtttgaaggaaagatgaccggatgtctggtagatattttaaaaggaacaaagcagtctggcgttatgctgtatctggtaactgattatgtggcggtgatagcggcggttgcagggccggctatcttactgcttgatgaaattacggctaatctggatgccgagacagaacagaatgtattaatggcgttaaagaaagtttcgaaggacaggaaggtgatatctatttcacacagaatgactgcttcgatgggacgtacgatttttatatcatagtatgcaatagaacagacaaaccagacaaaagagaggaatgcgggggaaaatgacaaaggggaaaccacagacaacaaaaaacaatacggcacaggagaatctgacagagcggttggaacgaaaagagacagtgaggggaactgcacttaccattacaggagggttcttgtgggggattgccggagtattcggaaaatacacatttgaatacaaaggagtgactgcaacgtggatcgtgaatgtacgtctgatcattgcagggatcatattattgaccagagcgtatatggtgcagaaggacggaatattccgtatctggaaaaataagcggcatgtgctcaggatgctggtatatggagtgattggtatcgccggatgtcagatgacgtattatctggcggtggaagattccaatgcgggaattgcaactgttctgcagtatacggcgccggtaatgattatggtacttcttgcacttaagaactggaaacttccgggaaaaaatgaaatccttgccctgatccttgcatttggcggaacggtattgctggcaacacatggtaatctgactcagctaagtgtatcgaaaacgacattgatattcggtctttcatcggcagtcgcaacgatattctataatctggttccgggtaatctgatgaatatctatggaacatttccgatggttggctggggtatgctgatcagtggaatcggtctgacaccatttgtgcagccatggacgctggtggaagatattacctgggactggcaatgtattggctgtattgtagttgtgattattttcggtacagtgatgtcttttagctgttatatggaaggcgtacggctgatcggtggttccaaggcaagtctgctcgcatcggtagagccgttaacagcgacagcaatgtccgtgatttttatgcatgtggcattttccggaatggatctggcaggatttgtcggaatcattgccggtgtgatcatattgtcacttccaaagaagaaataagagaaagattgtttaacgcagtactatgatgaaagaaactgtcttttaattaacaaatataaatgatgcataaatgcataaaaatagaataaaatgtataaaattgggaggaaaaacaaaaaacattcgtctataattgcatctatttattgattttcataaataattgtgataaaattaacgaataataaaggaatacggagggtataatatgttaaacggtttaaacaacattgtaaacttcctgaatggttacatctggggtgtaggaatgttggtactgattgtaggaagcggtttatattttacaatcagactgcatggtttccagtttgtacattttaaggatatgtggagcagaattattgacaaacaggattctgactcgggaatttcggcattcggttcgttctgtacgactatggcaatgcgtgtcggtacaggtaacgtagccggagttgcggtagcaatttacatgggaggtccgggagcattgttctggatgatccttgcaggtatgacgaactcagcagtatgcttcgcggagtgtacactggcagttctgtataagacacgtattgacggccagtatcgtggtggtggagcttattgtgcagagagaggtcttggatggaagaaatatggtacatttatggccctgattcttatgatcggaacttctgtattcatgccggcagcagctacatatacaatctgtgacggattccataatgcgatcaagattccgatgtgggtaagtgcattgatcattgcattgattcttgcagtagtagttatcggtggtgtaaaacgtatcagtgcgatcgcatctatgatcgtaccattcatggtaacggtatatctgatcgcagcagttgtaattattgttatgaacattacagcagtaccggcactgattaaaacagttgtaacagcagcatttgccaagaatgcagtatttggtggaacaatcggtgtgatcatccagcagggtgttaagagaggtacattctcaagtgcatctggtatgggtgaagcatctcctacagcagcagcggcagagacaagccatccggtaaaacagggtatggccaatgcagcaggtgtatggcttgatacagttatcgtctgtactgcatcaggacttatgattctgttaacagactgctttaatacagcaggcggatatgtcggaagtggctctacagaacttcctgcactcgcagcagcaggaacgaacggagttatcttcgtacagttagcatgtaagacagttatgggcaagatcgctcctacatttattgcgattatgttagcactgttctcattcacatgtctgatcagttactactatgaagcagagacagcagctatgtatctgttccagggtgaatcaaaagcaaaagtacgtaaagttgttacatggatcatgagaattgcaatgcctgttctgatcttcatctggggtaacctggaatcagatatcgcatggaacttatcagatcttgcacttggaagttgtacatgggtaaatatgttgatcgtgcttctgttatcaccaaaggtaatcgcactttataaagattacgaagaacagatgaaagcgaagaaagatccatattacaatccggataaaatctcatggtccggagttgataaagagatgtggaaagatatcaataagaaatatattgagaatggtaaataaatcttgaaaaaaaggcccccgggagatgttttgatatgctaccctcatataggacaatgaaatataaaagtcctatatgggggtattttcatgttcagaaagagtaagataaaatatcgccagccatagcatggctgacgatacaaaaatttattattttttattgtcctcttgacggggagcataccaccagacctccggggatgtttttgcatctcaaaatattttgctacatttttacttacaccttaaaccgatacccaacaccccatatcgtctcgatatactgcgggttggatgtatctacttctactttctcacggattttcttgatatgcaccgttaccgttgcgatatccccaatggactccatatcccagatctcccggaataactcttctttcgaatatacgtggttcggatggctcgcaaggaatgtcagcaggtcgaactcttttgtcgtaaatgtacgttcttccccgttcacccacacacgtcttgcggtcgtatcaatcttcagtcctctgatctcgatcactttattcttctctgccgcacttccggtcagacggtcatatcttgccagatgcgcttttactctcgccaccagttcacttggactaaacggctttgtcatataatcatccgcaccgagccccagtcccctgatcttatcgatatcatctttcttcgcagataccatcacgatcggtgtattcttcacatcacgcacctgacggcagatatcgaatccgtctgttcccggcagcatcagatccaggatcagaagatcataatcttcgttcagtgctttctgaagtcctatatctccgtcatttgcaacctctacggtgaacccgctcagttccagataatcccgttccagatctgcaattgcttcttcgtcttctactattaatatcttactcattgactggtacctcctgatactttcttagtacaaaatacattgtcgttccggtctcttctctgcttgttgcccagatcttaccgccgtgttcttctacaatcttctttactacagacaaaccgattccacttcctccggtggacgaatttctcgacgcatcggtccgataaaatcggtcaaagatattcggcaggtcttttgccgcaattccttttccgttgtcttccagttcaatctgtacaaaatctcctacatctttgacacgcagattgatcattccctttggtttgtccatatatttcaacgaattgttgacaatattgtgaatcacacgttttacctgctccgggtctgcaatgatccgtacattcttctctacataattaaaataaccaaatcctacattctgtgctgccagttcaaccgacaggtcatccgcacagtcgttgaaatattcattcgccgacacgatattaaaattgtaagggatcttattcgtatcgatcttagaatataatgtcagctcattgatcagcgtattcatctctgtcgctttattgtagattgttctgacataccggtctatcttctccggtgtatctgcaacaccatctataattccttcggcataacctttgatcgttgtcacaggtgtcttcagatcatgtgaaatgttacttatcagttctttactttctttgtcatatttcaatttttcttcggcactttccttcaggcgtcctctcatctcttccaggctctggcagagttttccaagttcatcgtcagcctccggtttcaactcaaaatccagattcccatccttgatattctgcgccgctgtctgcatcttgccgatcggccccataaccgcacggtaaatccatataataagagctgccgaagtaagtatcagtatcactacaattccaatcaggatttcgtagaaaaaatgtccaacctccggaattacattggatacatctgacacaatgaacgcacttcccttattgccgtcatcatatctgaaatctacctgttttaccaatgcttctgcatctccgccaagataaattccgttctccgatgttgtatctgtatctccatatcccggcaattgttcgatcaccgcttttacacgatcatcatcgctgcccgtatatacgattgttccgtcttttctcaccagcaggtatgcattcttattctccagttttttattaaactgatccagttctgtcgcatcttccatctcagatgcctgttctgacatatccttcagttcatgatacggcttctccgtaacacgtgcaagtacctgcatggaattcgtaaaatcagaaatcgtcgttcctgtaatcccataattcttctccaccactccgatctgatagtggcataccattgaaaccatcatggctgccataaagaccggtataatgataatcgtaaaaaatgctataactaatcgcgttttcagcttcatgtatctgtcctccactaaaaaaaattatagcatgaaaaatgggtgcttcacaccaaagcacccataaacttttataaaatttctataaatattttttcaaatcttctactttgtccagtttctcccatggaagatcaatatctgtacgtccgaaatgtccgtaagccgctgtctgtttgtagattggtcttctaagatcaagcatctgaatgattcctgccgggcggagatcaaaattctcacgaacgatctctaccagtttatcatcttctactgcacctgttccgaatgtatctaccatgatagatgtcggatgtgctacaccgattgcataagacaactgaatctcacatttcttagcaagtcctgcagcaacaatattcttggcaacgtaacgtgctgcataagcggcagaacggtcaacctttgtacagtcttttccagagaaagccccgccgccgtgacgtgccattccaccgtaagtatctacgatgatcttacgtcctgtaagtccactgtctccgtgtggtccgccgattacaaaacgtcctgtcgggttgatgaagaactttgtcttctcatctaccatgccctccggaatgattgcatcgaatacatatttcttaatatctttatgaatctgatcctgtgtcacttccggatcatgctgtgtcgaaagtacgactgcatccagacgtgccggaacaccattctcatcatattcaaccgtaacctgtgtctttccatccggtcttaagtacggaagtgttccgttctttcttacttctgtaagctttcttgagagcttgtgtgccagtgcgatcggatatggcatatattccggtgtctcatcagaagcataaccaaacatcattccctgatctccggctccgatcgcatcgatctcttcttctgacattgtatgctcttttgcttccagcgctttatcaacacccatagcgatatctgtagactgttcatcgattgctgtgatcacaccgcaagtctctgcatcgaatccgaattttcctcttgtatatccgatttctttgatcgtgtcacgtacgatcttctggatatcaacgtatgcattcgttgtgatctcacccataacaagtaccatacctgttgtagttgctgtctcgcatgcgacacggctcattggatcctgtgccatcaatgcatccagaatggcatcagaaatctgatcacacattttatccggatgtccctctgttactgattctgacgtaaataatcttctttccacgttcttttctctccttcttttctaaaaaacagttcccgcattctttctcttgggattgtctgtatctccagaacctgccaccggcagcttcttccgaacgcatggcgttttaaaaaccgtccacttatataagtggacggtttgatatcttcataaaccaatcctcttattgttcgatcactcgctcaggctggcaccttcctacaatggggttgccgcagtttcacagatcctttgtatctccactgctctgaataagagaaagtttgcttttattaagttatttttgatacgactaagactttactctattttccctatactgtcaatagacatatataagaaaatgtatcatctagcctacttttaatttgaacttctgaatcgctttttcagaatctactctttcgatgattccaccaatgctgcgaagtttctcttcgaatctttcatatcctctctggatatatacgatgtcatctacaattgtgattccatccgctgcaagacccgcgatgcaaagtgcggctcctgcacgaagatccggtgcacttactcttgctccggagaattctgccacgccttcgatcgttgctgaattgccttctacctttacattggctcccattcttgcaagctcatccagatatttgaaacggttttcaaaaatactctctgtaatgatacttgtccccttacataaggccagtgtcacgccgatctgcggctgcatatctgtcgggaatccaggatacggaagggtcttcacatgtgtgcttgtaagatctccctttgatacaacacgtacagcatcgtcgaattcttccacttcacaaccgatttctaccagttttgcgatcgtagcttccaaatgcttcggaataacatttagtaccgttacatctcccctggtagctgctgctgcgaacatgaatgttcctgcttcaatctgatccgggatcacagaatattctgtgctgtggagacgctgtacaccacggatcttgatcacatctgtacctgctcctctgatgttggctcccatgctgttcaggaagtttgcaacgtctacaacgtgcggctctttcgcaacattttccagaatggtaagtccttctgccatagctgctgccatcataacattgatggttgctccaacacttacaacgtcaaaataaatatgttttccaacaagacggtctgcttctgcaacaatcttgccatgttcgatatctacatctgcaccaagtgcacggaatcctttgagatgctggtcaattggtctgcttccgatattgcatcctcccggaagtgcaacttcggcacgtctgtactttccaagtaatgctccgagaagatagtacgaagcacggattttcttaatgtaatcatactcgatatctacattcttaatgctggctccgttaatcttcactgtatgacggtcaacacgatgtacctgtgctccaatcccctcgattgcgtcaatcagtacgttaatgtcatttacatccggtaagttatcgatcaatacagtttcatctgtcatgattgctgccgcaagaattgcaagtgctgcattcttcgcaccaccgatttccacttctcccacaagcggatgaccgcccttaataatatactgttccatcaattacacctcattaatatttatataaatctctatctacaataaaactattcttaatctgctattctatctttctgcaaatctgtttcaattatctaattctaaatatctctaaatctaatttttctaaaattcgtgcataaatttctgcatcacaatataacccctaaaaagggttcgcgcctattatagcacaaattttccaattgtaaaatattttttacagttatgtaattttattgtaacatattccaattgttctatctatacttgtgcacttttactcccctaatgcatctaataccgattcaatcgtatcttccagcttctgattatcttcacacactgtaatatctgcatacttttcaaaaagctttactctttcatcatacagatctttgagcgtctgtccgtcacgcaataccactccacggcctttggcatttttaagtctgctgtttattgtctcaaaggatgcctgtaaatatacgactttgccgatttctttataatgtttcatcgcattttcacaatatactacgctgcctcctggcgagataacggtacgttccgctttcacctgtgcatttaccctgtcttctactttcaggaagccatccggtccaacgtcagcaataatatctttcagaagtttcccttctgattcctgaatcagaatatctgtgtctacaaatttgtatcccagtctctttgcaattaccacaccaactgtacttttcccgactgccggcattccgataaaaataatgttattatctgccatgatgtgccctcctgtatgttatgttctgactttttcatctgaaaacattcatttatcaccgcacagtataacacacaagagggcgaagtggaagtttttttccagatgccctcttgtagatcaatatatttttttacgtatctctctatgttccacacgtctcctgcaaagttcctgatatgtcataacctcgatcagatccataagccaggcacccgggttttcttcttccttctccgccttatcatagatcctgcggcacatcagacgaagctgcaggcggtccggatattcatcatacatcatgcttccgtcatattccattctgtcacattcctcttccatataaggaagtactctcttcgccgtatccgggtaaatgcttttcatatagtcatagtctcttcttgcattccggtcatcattatacagcagcggaactggataagccatatagaacggtaatttgttctccataatcctgattgctccttggcggttctatctgtattaagatatgcacggagagatcaatcggtgaatgagaaactatctattctaattgaatgttatctcatatttttcaatattaacggttgccgcttcatcactagtaaatataatttcatttgcttccaatggcgtaggaatgaccacacttgccgtctgctctccatcattaataaataattctacagaatatctgtccatgataaaatgtagtttcggcgcatgatgtttttccgcaatttctatctttctcacacagacaacatctgcatttacaccactgtaggtccggtcaatttcaatctgatgtttttccggataatatgtaaatgttgttgtatattcttcattatgtgccacatctaccttgaactccctaccttctacattcgtaagttctaccgtcatgtcaatcacccggccattgataccatccaaagacatctgtccgctaattttctgttctgtatagatgattggatttttcttatacttttccagttctctcaccggactttgccagattttcccatctttgatttttaattctcttgggagtgtcatcattccctgccatttctgtccttttgtcatgacacgtgcatcccacgacttcatccatgcgaccatgatccgcctgccatccgggagctctgttgtctgtggtgcataaaagtccagtccataatctaggcttctctttttctcccatgcaaaatccgatatttctttttctgcatctccaataatataaatggaattatgaccgttatgaaattcgtacttttgagcatgcatattctgcggagaacaaatgattacaggatacccgtctacttccagataatccggacactctaacatatctccattctttccgtcatttctcaaaaggactttttcataccgccagtttttatagtccgcactgctaaataagactatttgcccacaattttcctcatagcgattgcctacaacgcaataatatctgccatcctttttccatattttcggatcacggaagtcttttctgtcaaatttctccggcatgatatctccttttataactggattatcctgccatttttcataagtcttcccatctccaatggcaatgcactgattctggatttcttttccgtctttctggcttactcctgtataaagcagcacatgctttccatcagcttctactgcacttcccgagaaacatcctatgtgatcataatcctgatcaggtgccatagctaccggatatgcttcccattttagcagatcttcggtcacctgatgcccccagtgcatcggtccccattctgttttatatggatagaactgatagaacaaatgtacttttccctggtatacagagaagccattcgggtcattcatccatcctgcttccggtgtcacatggaataatggtttttctttttcatctatgtaattctgtctgatatattcattggctttttcaagcatacgttcttcctcttctattctaaattattctgctccgattacctgctctgtttccttatcaaagaaatgcatcttatgtggcataaaggtaaattccacctcatctcccacctggcttacttcatattttgatactcttgcaatcgttacgcttcctccaaagtcaaaatacagattattctcatttcccataatctccgtattgtcaataactgctttctgatgacttccataaacgtccagattagttatatcgaacttgatatcttctcctctgattcccatgataacttctgaatatcctgcaatacgttttgcaattgcttccggaagttccactgtattgccatctgcaaatattaatttctttccgtctactttcacatcataaaaattcatctgcggagatcctataaatcccgcaacaaatttattcaccggatgctcatacagatccattggtttaccaacctgctggatcactccatctttcatgattactatgcggtctgccattgtcatggcttctacctggtcatgcgtgacatagatggttgtacttccaagatttctgtgtaacttactgatctcatttctcatgctgacacgcagttttgcatccaggttagaaagtggctcatccatcagaaagactttctggtcttttacaatcgctcttccaagtgccactctctgtctttgtccacctgataaattcttaggcttacggtaacgatattcttcgagtcccaggatatcaattgcccagtctacttttttcttgatctcatctgccggaaccttcatgttcttcaatccataagaaatatttttttctaccgtcatatgtggatacagtgcatagttctggaacaccatagagattcctcgatccgccggtgcaacctcattcacacgttttccatcaataaaaaggtctccacttgtaatctcttcaaatcctgcgatcattcggagtgttgtggatttaccgcatccggatggtcctacaaatgcgataaattctttttcttctatatctaagttaaagtctgtcacggaattcttatcgtttcctgcatattttttacatatatttttaaattcgataaagctcatcttttagccctccttggaacctgttgatattacaccctctacgatctgttttgagaagagtgaatagataataatgaccggaattgttaccattgtgataactgcaagggtctgtcctgttgttgtgttatcatttgatgtaatcgcattcagaccaatctgtgctgtcagaagatcactggatgtaaatacaagtgacggccacagataatcattccatacattcaggaatgtaaatacactaaccgttgccactacactctttgacattggaagaaccatagtaaaaaagtattttaccggtccacagtgatctaactgtgctgcctcatatacatcatccggaagtcccaggaatacctgacggaacaggaaaatgttaaacggattcacgatcattggaagtacatatccaagcaccgtattcagaagtccaagttttgcaatgatcaggaaatgtatcgtaatgatcgtctccatcggtacgatcatcagaagcataatgatcagaagccagcgttctctgaatggaaaattaatcttagccaatgcatatcctgccagtccatttacaattacaccaagtacgatcaatattgctgcatagaacaaggtattacacatatatcgtacaaatcctgtatttgttaatacagatacataattttcaaagaaattgccgttcaatgccggtggaatgaatgccgccatactgttcatatcagcagtgattgccgcgtctggtttgaatgagtttgccagcatccagataaccgggaacaggaacaacaatgatacgatcagaagtacgaccgtcagtatccaattatttcttttttgcttttttgttaacattctgatcctccttatctcttgttgcgattgtctggatcacggtcagtatcattacaaagaatgcgaatacaatagccattgtagatgccagtccaatttcccagttaacagtacctgtttcatatatatcatacacaaccgtatacgttgaattcgatggtcctcctccggtcataaccattggctgtaccaacatacggaatgctccgatcgtaatcgtaattaaaacgaacacacacaatggtttcaattccggcagggtaatgtccttgaatttctgccacgttgttgcatggtccatctcggccgcttcataaagtgtcggattgattgcctggattcctcccaggaagatgatcatctgatatcccattccctgccatgcactcataatcgcgatggatggaagtgcctgactggcactgttgatgaatggctgtgcatcaattccaaagaaagaaaggattgcattcataattccttccgggctgtagatctggatccacagtgttgacacaacagcaagtgacatgaccaccggaacaaagaatgctactttgaaatacttcttgcaatgcgtcactttattaatcagaagtgccagcacaagcgctccaattccctgcagcggaacaataatgatcacaaactttacggtattaaaaaatgcctgtgaaaacacatcatctttaaaaatctgaatatagttgtccagtccgacaaaatgcgtcagtcccggatttaaagcaaagaaatcagtaaaactgaaaatcaatgtcaggatcatcggcaagaataaaaatatcgtaagtaacacaagtgccggtccaaaaaacgccattcccataatggattctgttcttttcttcattatttcatcacataacgctttaattttgcgttaatcctttctacagatttatccagttctgtcttcgcatctttatcggtaagcaccgaattttccagtacttcctgtaccgatgcactaacctgtggatatacaggtgtttttgatcttggatgtccatatttactcagctgatgatataaggctttataattctcatcttcttcaaaaatcggactgctctcaaacgcttcatatgtagatgggaaactcttactttcatcccacagacgctttccactttctacaccactcatccactgtaccagctttgtcgcaccttttagtttcttcgtctttgatgatgccgcaaatgcccaggaaccggttggtgtatatcttccgccatcccagttatcggatactacatatggtgcaactccaaggtttacatccggatagttattatagattgtatttacttcccatgccccgtcgaacttaaatgctgctcttccgctttcgaacaggtctgtgatctgtactttagacatatatccattatccaaaaacgatttaaaataattcactgtttccagattctcttttgaattgaatacaccgttcaccttcagtccatctttatttacaaagtcaccgccatttgaccagaaaaacggtgcataataataaatcgtagcttctcctgtcgggaaagtcatatccagcgcataaccttttttcttctctactaccggctgtactttctttaacacctctgtgaattcactccatgtccatgggtgatctgcatctggaacttctacacctgcttctgcgagaatatctttgttataataaagtcccacgctggattccattgctccaagcgcatagagcttgttattatacgttccctgctgaataatggaatccagatacacgctcttttcttcgtctgttaattttgcaagcggctggataattccgttctctgcatatgccgctatattagggccatcaacagtaagcacatccggcagatctcctgacatcacggatgcattgatcttatccgaatagcctccaccactgtcatttcgtggaataaattcaatatctgcaaaatatttcccatcatatttcttattaaatgcatctacagatttcctgtagcactgtccttcttctgtgtcttcgattgaatgtacccagatagaaagatattcttcgcctttgtcatatccctttacttctcctggttgcggctgtttatctccacaccccgtcaatgccattgcaaagaatgctgccagcagtacccctactgttcgtttcttcatagctttctcctttcagattcacgattgcgtaaccagttaagtaaccggttactttatatgctcataatactatccagaatcttacttgtcaatagatttcaaagaaaaagttaccggttacttaactagttattttttgtttgatttttttcaatgcacttgctatactgataatatacattataaggaagaggatttacatgaaacagaaaaaagtaacttttgcagatatagccgcttatacaggcttttcaaaaactaccatttccagatattttaataatccagattctctgactcttgaaaatcaggaaaaaatcgctcatgcactggatgtccttggataccaggaaaataagctcgccaaagtactggctaatggaaaaagtgaatttgttggaattatcatccccaacctgtatcttcactattactctgagatgttaaaccagttactttctacttacgaaaagtataattataaatttcttgtattcattggaaataataaaaaagagattgaagaaaaatatattcatgaactgatggcttataagattgagggacttattgtcttaagcaataccatttcgtctgaagaacttgcttcttataaactcccggttgtcacgattgagcgggaatgtgaccatgtctgcagcgtgtctacagacaactatctgggtggtgttcaggcaaccagtttgttgatacgcaataaatgtgatgttattttacacatcaattccatattcccagatacacttccaacctatggacgtatccggggattcgaagatatctgtaacgaacaccatgtcgttcacgaattaatccaaagaaatcttggaaacacttatcaggaaaccctgactcaactaaaaaacatatttaacgaaattgaagaaaaatatccctcacaaaaaaagggggtctttcttgcaaatgacacttatgccagtatgttcctgaatctgatatttcaaaaatacgggaaactcccgaaagactatcagattgtcggattcgatgattctcctattgcaagcgaagctatccttccaatcacaaccgttggacagcagattgagaaaattgcacagactgccatggaacttctggttctccagatgaatgaaatgaaaaaaaggaaaccggctcctttaaaagaaccggttcataaacagattacgccggtattgatccgacgtgatactacggattaacatactgaataatacttgccgtgtgcaaatggtggatctcctgaagtttttggattactttgggagattcttttcgtttcttttcattaattcttcagccgttttttgaatgacatttatatcttcttctaattcatctgcaatctgttctattgactttcctttttccaatttcttctttactagttttcccatcttttgtcatctattctcaacttttatctgttctcctgccggtctgttccttcttgccccaaccagatacagaattgctggaccaaaattaacaataattccaataattaaaattgggaaatctgatgttttcaaaaaagcttttccattatctattgcaataataatttcattgcaatacattaacaaatcaacacccatatagataacaattcctgctgttaactgttttgttttttctgtattattacagtttgcttccccataatgtcccagataccagatgcctattgaaattgcaagcatccataatgtgtgtacacgttctccagccaaaaaacaaacattaatcaaacaacctacaattccccaaagtcccaacaattgaaaatatatcgaagttcctctaattaatttccgtcctcccggtgctctgattcctcctacagaataaatcagatcatcacaaaattcatgaaccgactttcccagtactgtttcaaaattttcattacgctcctgtgcttcttccgccattccagtgatatcttcaatcatttggtcaatttctttttctgtaagtgggaatgtcttgatgtattttttcatcttcctgaccattcttttatttttcttcgtcaacataatctactcctcctttttcaaaattctatttactgatgattgtacttccgtccagcatttaataaactcctgcaaatatgcctctccttcatccgttaatgaataatactttcgttttggtccaagcggcgatggtcgtagttctgaagaaatcatccctttcttttccaatcgtacgagtaatggataaatacttccctcttttacatcttcaaatccgaactctgtcaatgtcgttacaatctcatatccgtatgtaaccgtctcggataaaatctgcaagatacatccttctaaagttcccttcattaattgtgatttatcatacatattttcacctaccttgtatactatagtagttcttaactatattgtatcacacagtagtggtttgtcaatgaatttgcgtacaataagaatgggtttctaactatttttccggcttattctgacataaaaaaatccacagatttaagcttttcaacttatatctgcggatttttcatctgagaatttctcagtattcctactccttttctttataatgatgcgcatcctccagcatcatatctttcaccttcatcagacggatctgggtgcttcgttcattctcgtccagtttcatcgtaatatacttgatattcttctgtgcctccggaatgatcacatgctccagggcgttgacacgtcttctggtcttctcaatctcagctgccataagctggcaggctttttctgtctctgcaagcttcagcatatccggcaggatatctgccagagattttacggctccgtccagatcactcgatgtaaatgcgaatccatacgaatagatatcattcgcatctgccgttctggtcttcgtctcgaatacaggaatgtctacactcatgacattcttctgtccgacttccagatctacttcctgcttcggtgccatcagtgccgtgttcagggttgcttcatccatgccggctttggctatgacgaagttcttattagctgaacgaatccccgcttctaccttttcccgaagctccatgttcacttttaccagatccaggaactgacgcatcagttcgtctcgtttatctttcagaagtttgtgaccttttatggctgtgaccagtttcttcttagttctggtcagttccatacgggtaggggttacctgggttgacgccatagtatcactcctttctatactttatatattggacgccatgccggctcgaatccgcttcgcttcttctcgctgagggctgacaccctatgcatcttgccagatatggaatcgcaggttaacctgcattccatatctgatcaatctgcgcatggcttactgcttaccataatactcgtccaagaacttatcatcaattcgtttcaactctgatcttggcagcatagacaacagcttccatccgatctccagtgtctcttcaatcggtctgtcggtatcgtatccctgtgatacatattctttttcaaatgcatctgcgaatttcgcatataccaggtcaatatcagtaagagctgcctctcctaagatagtcattaattctttcgcatcttttcctcgcgcatatgccgcaaataactggttcatggtatttgcatggtcggctctcgtcttgccttctccgattcctttatctttcagacgggacagggatggcaatacatcgattggaggcttgatacctttacggtacaaatcacggcttaagatgatctggccttcggtgatgtagccggtaagatccgggattggatgcgtcttgtcatcttccggcatggtcaggatcggaatcagtgtgatacttcccttcttgccattctgtcttccggctctttcatataacgttgcaaggtcggtgtacatatatccaggatatccacggcgtcccggtacttccttacgtgcggcagatacttctcggagcgcatctgcatagttggtaatatctgtcataattaccagtacatgcatgtctttttcgaatgcaagatactctgctgccgtcagcgccatacgaggagtagaaatacgctcgattgccgggtcatttgccaggttgacgaacaataccgttctgtcgatggctcctgtctctttgaaagattctacgaagaagttcgactcttcgaatgtgatacccatagcggcaaatactacggcgaatttctcattgcttccgcgtacctttgcctgctttgcaatctgtgctgccaggttggcatgtggaagtccggatgccgagaagattggaagtttctgcccacgaaccagtgtgttcagtccgtcaatagccgatacaccggtctgaataaactcttccggatagcttctggctgccggattcataggaagtccgttgatgtcacgtctttcatccggcagaatctccggtcctccgtcgattgggcggcccagtccgtcgaagacacgtccaagcatatcttccgatacaccaagctccatgcttcgtcccagaaaacgtactttactgttacttaagttgatacccgtggcactttcgaataactgcaccagtgcatcatttccattgatctccagaaccttgcagcggcgcttctcaccgcttgcaagctcaatctcacccaattcgtcataggctacattttcaacgccgcgtaccagcatcagaggtccggcaacttcctgtatggttctatattcttttggcataatttagaagtcctccttcccgaatgcagccgcaacttccttgtccagttcttcttctacattcttatattcactttcgatatcggcgtctgttgtatatttataacggccgatcttttctcttaccggcatggcgatcagtgcattcatgtccgcacccttattcagtgcatcgacagatttctcataaaatgccagtaccagtttcatcatcagatactgcttacgaagcggcgtgtaagtgtcgatctcatggaaggagttctgatgtaagaagtcctcacggatggatcttgccgcttccatcttcagacggtcagtcggtgacagggcatccatacctaccatctgtacgatctcatttaactcggcttcttcctgaaggattgtcatcatcttctgacggtcttccatccagtccgctgccacttcctcgttgaaccagtttgccatattgtcaacatacagtgaataactggtcagccagttgatggctgggaaatgtctcttatacgcaagtgcggaatccagtccccagaatacctttacaatacgaagggttgcctgtgataccggttcggagatatcaccacccggaggagatacggctccgataacggaaagtgcaccttctcttccttctttaccaagggataccacatgtccggctctttcatagaactgcgccagacgggaacctaagtatgccgggtaaccttcctcaccaggcatctcttccagacgtcccgacatctctcgaagtgcctctgcccaacgggatgtagaatctgccatcagcgctacagaatatcccatatcacggaaatattctgcgatcgtgattccggtatagatggaagcctcacgggctgcaaccggcatatccgatgtatttgcgatcagcacggttctttccatcagagactgtccggtcttcgggtctttcagttccgggaattcattcagaacgtcggtcatctcattgccacgttctccgcatccaatatagaccacgatatcagcctctgcccacttagccaactggtgttggataactgtcttgccgcttccgaaaggtcccggaacagctgccacaccacctttggcgatcgggaagaatgtatcgataacacgctgtccggttaccagtggttttaccggcggcagtttcttctgatacggacggccttttcgtaccggccatctctgcatcatcgtcagttctttgtcacctttttcggtagcgatcactgctaccacttcttctacggtaaatgttccggctttgatctcttttaccgttccttttactccataaggaaccatgatcttctgctgtacaacgatggtctcctgcacagttccgagtacgtcacctgcttcgacctcatcgccggcttttgcgaccggtacaaattcccatttcttatcacgctttaacgatgcgacttccacgcctcgttttaagttatttccggaaatcttcataatgtcatccagtggtctctggattccatcgtatatacttgtgatcagtccgggaccaagttctactgacattggtactcccatagactctaccggctctccaggtccaagtcccgatgtctcttcgtatacctggatggatgcctcatctccgtgaatctctatgatctctccgatcaaacgctggctgcttacacgtaccacgtcaaacatgttggcgtcacgcataccttctgcaataaccagcggtcctgctacttttttaatcgttcctgtactcatacggacgaatcaacctcctttagctgccaaatataatatcggaaccgacagcctgctctaccgatttcttcacacctgcaactccggcgcctgtatttccggcgatacccggaatctgaatgatcgccggtgtgacctgttcctgatatttttctatctcatgcgttaactcagcggcaagtttctctgtgatatagataattccatatccgccttgtgccagctgatgtaatttctctgcggcttcctcacgggtctggacggcaaatgtatcaaggcccagtgctgcgaatccgaagatgctgtcataatcacccactactgcgatcttatacatacatttcccttaccctttcccggattgaatcatccggcagttcattctgctttccggataaaatgattcgtaccgttttaatctcattctgccttgcaattacgtaggcaattaccggtcctatcgtaaatgcatgatatttctccgggcttatcgtctgaatgatccggttgtcacaccatctttcaaatgccgacggcgactctgccagtgcatccgcaccttctgcataagccgttcctcttaagtattcacagatggcatccatgccgctaagtgccgctttcgagagttggctgacacttaaggaatcacattccgccattgcccttttcataaagtctgttgattttgcggtcttctgtgaccgaacagcgatcttgatgtccgccactgccactgtggattctgcataatcctgtatgatcttatccggtgactcttttcccgcctgataaatagcatccagtgccgcccggtctatgatcacatcacagagctgcccgtctcctgtatgaagaagtgtctcgtatgctttttctcctgcgatccgcatactgtccggaagctttccaaagtctctgtcttctacgatcttacgcatctcttccccgggaatccgaacatcttcataatagatatgccggttcttatctccggtgcatacttccttgaccgctgcctttaaattatgaaaaagcttcggataagaaagcacatcgaaatgttccattccgatcgacagttcttttactacttcccatgtcttttcttcttctctcgtcaggatcttttccgcatccccgctgctttcggcatctccccaacctttctcttctaagaactgcagtgcctgatcataattctggcacgcaatcagctggtcgatggtactgtcagagaacagggatacttccaaggcacggattcttgcgaccgcataggtatattgttcactcatgttgttcctccatttccgaacattcctgatatctgaacattcctactggttcttctgatgctttccgcatcatacaaagagcagccggtgaacgatatctgaaagctcatcccgcttcgcatcgaacattgccctgatcgtacagttctcttcaattccaccgtacgcaagaatgaatccattgtcaatattatctctgcccgctccggctacagtaagttttcctccctttgccagagctatttcttcaatttctttgccaaatcctaccggcatattttccagatcttttacggagaaatagatctctccctcctgcggaagtatatatacttccagaatcgacagaagcatctgataataatcatccggcgcaaggtttataaccttttcatacgccttctcgatgatctctgcgatcatctcctgctttgcttccagaagtctcgttcttctctgaagatcgatggctgatttcacacgctctttctgcgatgcagtatctgcttccgactttttcaggatagtatctgcctgtctggctccctcttcctgtgccttaagcttcatctgttctgcctgtgctttcgcatcttcgatcttcgcatccgctgtcacttttgcctcgtcaaggatctgacttttgatcttatctaatccagccattgtccttcacactccttctatacctgaattgctgttacggaaaggatagaaatcagaagtgcaaggatggcatatgtctcaaccattgcagggaacaacattgctttaccgaactgatccggtttctttgctacaattccgattgctgccgctgctgtctgtccctgtgcttttcctgagatcagaccaacgattccgattggaagacaagctgccaggatcagaagtcctgtcttaggatccagatctgctgcaccaccgccaagaagtccgatcttggataatgtaatgaaaccaaccagcagtccgtagattccctgtgtaccaggaagcagctgcatgatcagtacttttgcgaatttgcttgggtcttctgttacaactccggacgctgcctgtcctgcaataccaactccgatcgcagatcctgcacctgccaggaatactgccactgccgcaccaagaagtgcatataccattcccatatcattccaaatactcatatctatttttcctccttaatatctacatattttgtctccgcatgaaacggttcgaaaggttttccaccgccttcgtagaattttccgaagaattccacaaattgaagtcggttggtgtggacatatgcaccaagcaggttgattgccaggttcattgcatgtccgacgataaatactacgataaataagatgactccaaatacactcttaccaagcatgcttcccatctggttgacaacggatgcgataacacctgttgcaagtcccagtgccagaagtctggagtatgataatacatcacttaaccatccggtgatattatagatatcatatgctccaagtgccagccgaagtgccggattcttgctcgatcttccggacatcaataacagtccgagtgccccgatgattgccagtgcttttgacaatgtaacaagcgctgccgggaacacgatcttggtctgtgcgattgaagcaaatatctctgacggaagtaacatcaggatcagtccgatcaggaaaatgtaccacaatacgatatcgcagaagaaatccagtacctttccgtcttttaacaacatatatcccttgatcccaagacccacgaacagatggaccagtccgaatgccatcgaatagatcagaagtcgcatcggatcatttaacggtgcaaaccacagcggcttgatcgtcagttcttttccaaagaatgtgctcgatacgacgtctacgacatctccgaaatatccaccgaataagattccccataccatggtagaaattccacagtacatgaacattttcatagatttcctcatatcggcactcatgcgcgggaatttcttaaggacgatcagacacacgattgcgatgatcgcaccatatgctgcatctgataacatcattccaaagaaaaatacatagaagaatgacatgatcgcggtcggatcgatctctcctttatgcggaagtccgtaagactccaggactccttccacactttccgaaaatccgttattcttaaggatcaccggtggttcttcgtcttcttttaactcttctacatcgatcacacagtcatatgcatccccgattcctttctggatcgccggtatcgcttcttttgctgcgtaaccactgataataaatgtacgtctggactgcggaagtgttcccagtacttcgtacttttctgcacgcatccggtaatagtcaccgatgatcttcagttcctcccggtcttctgcgtaagatatgatctctccccggatatctgcaattgtctgttcgatctgtctgatctgttcttccagttcttctttctgctttgccggaatctgctctgtcgatacaaccggtcttgagaatcctgcagtgcggagtgtattctccacatctgctgcctggtccttcatacagaacacgcttaagtacacggcatctttatcctgacttataaccgatatatctacggcttcaatctccggatgatcttcggcaagctttccgtagatcatttccagtgtcgtctccgccgccatggttccaagaagcattgccgtctttttcgtgcccggataattcatcgcaacttccagactcatccatggtgtaagtgcttctatctgggtattccgcttcacgatctcagcctgtgcttccgcaattttcttatgatcagcgatcagaagtcccgccacttccatgactgcttcctgcttcgctgcggcagcttccatcgtctttttatcgatcagctcatttccttccagactggcgaacatggattttttctccggtgtatactgattcaatacatccagtgcgttttccgtgatctgcacccgtttctcgaagcttgatttcgcactctgcgtatccatcttctcgaatccggcttcgtcctgcgcgacctgatgcatctctatcatgcccatggactgcagtttttccagaatcgctttccggtcatgtttcaatgcgcagatactgattcgctgcatctgcaatactgccataactgcatccctccttttttattttttcacgttcttactcttcccatatcatcagagcaatgctttgatgactgcggataccgcctcctcttcttttccctgagccagtgcttttaatgcttctgtctcctgttccgtcttctcggaagcctgtttctttaagacttctccttcttctttcgcctgcaaaagatctgcttctgcctgtttctttgcatttgctacagcctgctcttttatctcttttgcctctctggcagctttttcaaggatctcggtacacgttgcatctgcttttcttatgatctcatccgcttcattctccgtttccttgatggtcttaatggtttcttctaccattcatctaccacctctccttcaaaaaaatacaaaatctaatttaaattataatcttatttctgcaattttaccatacatttattatatttgttgtaaattgcacgtcactttgatacatttttatcattttgtcgttttatatttgtgcacttattaataagtagaaacgcctgccagcgcctcctgtattttttcatatacctggtatgaaaataaggatatcatctcattttctcaacgaaaacggacaatatccttattttgtctaaataatatggaatttatacagattggattccttttcttaccagtgtaattcgtgaagatgcccctccagattcatacctgcaaatccgttctgtctgagtgcttcgtaaagcacgatcgcaaccgagttgccgaggttcagcgaacggatgtcgcctaccatcgggatacgcacgcagtcttctttatgctctaccagaatctcttccgggattccggcactttcttttccgaacatgatgtagcagtccggttcatagttcacttctgtatataccttcggtgcttttgtcgttgccatgtagatcttggctcccgggttcttttccaggaaatcattgtaatcaatataggttctgacatccagatgctcccagtagtccatgccggcacgctttaagttcttttcattcaagcggaagccgagtggctcgatcaggtgtaatctggtgttggtggctacgcaggttcttccgatattacctgtgtttgccgggatttctggttcgtgtaatacgatgtttaacatgttgtggtcctccgtttttctattctttttcaaataaaaattctatatagctgtatatttccgaaaagtcaatctgacattttccagcaaatatcttcaccggcacctggtcttcaaaaccatagatgtccggtaactcattatgttccaagtcatatactacaacttttttcttatccgggtcaaccatccagtattctctgactcttgcagtgatatatttttttagttttaagcccatatcttttttcttgtagatggtaataatatctcgattaccatatccggtgctccgtagacatggctttgaagtatcttctctctatcgcagcatatcacgacatccggctgtatcatcgtcctgtcatcttcatccagctgtacgctgaccggtgacggcagtaccatacataatcctttgttctgcctaatgtactctcttaatttgatactgatctcaaattagtgtgtattcgccttgctttttaccacgaaaacttttccagatatcaccttcatgatctgtgccatctccatagatgcgataagccgatacgctttctttcatcataccaggatatggattagaaacagatcctttcatatcttctgtaccgttcccaatggtacaccggaacgatctgatatctgttcgcagctgaaacctaattctgttttcttctttttcatctcttctacagtcataggatcatctccttcttccgaacgcataacaatctatatttctaatattgttttccatattcttctaataatctgacatacttctctccacctgcactgctgcgatcgcaccatctgctactgcagtcactacctggcgcaggctcttgactctcacatctccgacagcatagacacctggtacgttggtatgcatgtcctcatccgtcttaatgtatcccttgtcatccgtctctactttatctgcaaacacgccggtattcgggatcataccgatgaatccaaacagtccgaacagtccgtctttcggatcggcttctatctttgtaagttctcccgtcttcacattcttcacagtcatcgtctgaagcagtccgtcgccgcccacttcttcgactaccgaatcccacagaaatgtgatcttcggattggcaaatgctttctcctgaatagactttgctgcacgcagctcgtctcttctgtgaatgatcgtaacttttctggcaaattttgtaagatacagcgcttcttccaccgctgcatccccgccgcccgctacatagacttccaggtcagtaaagaagttcgcatcacaggttgcacagtaagagattccgcgtcccttgtactcctgctcgcctttgcatccgatcggtcttgcatatgcaccggttgcaatgatgatatttttcgcctgataggtatctttttcgcctgtcaggactttgatgtctccgctcagttctgcatttgtgatcgtatcacggacatgttctgcgccaaactgttctgtctgttcgtacattctgcgtacaagagaaactcccgtctctccttctacgatttgtcccggatagttttctatttcgtctgtgttgataatctggccgccggcctgtcctttttcgatgatcagggtgtccagtctgcttctgcctgcatataagcctgcgcttaatcccgccggaccggcgccaaggatgattacgtcatatatgtgatccatgtgtgtgtcctctctttcttttcgtatgtatttttaaaattattgatcgtatgattctatcttattttacatgattttagctgttggcataccaacaaattacaattaaaaattccctttttgtttttatattacttgctaaagatatatttctatgatattataattatacaaaaaacaaccgctcaaagtggttggccatattgagtaatagaaatccacccagtcctgccaagactttttagagggtgggttttctatttcctactgacatatcaaatatataaaagtcagcagtgatattatgaacataccaaattgcattaaatctttaaagtcaaaatttttattgttcatttacaccacctcctatctatgtatcttaggaggccttccacccatattacggttgtttatagtagtatatcatatacgttttatttattcaattattaaataaacttcattatatcttccacaatctgctctttcgtcagatgattctctttcagaacttctgctacatcataacggtcgaggaactctttcttcagtccgaagttcagaaccttcatgtccgaatctccgtagaatcttgcgatcttctcgccgaatccgccatccagaatgccatcttccagagtgatcacaacatcatgatctttcttaagctcttccagaagttctgcatcaatacctgtaatataatatggattgatcacagttgcatctgttccggttactttcttaagctcttcggcaacttctttaccaagtccgtagaatgttccaagtccaatcactgcaaccttagaacctttctgagttacttcgtatttgttcagatcaccgaagtcttttgtaatctcttttccttctgagatcacgctgccgcccggaagcttgattgctaccggatactcattctgttcgatactccagtcgagcattgccaggtattcttccttcgttgtcggagcaaggtataccagattcggaatattggccatcatcgggatgtcatatagtccaaggtgtgtcacatcattcattccgtataccgaaccacagaatgttacaatagttgccgggctgttattaatgcagagatcctgtgcgatctggtcataagttctctgtacaaatgtactgtatactccataaaccggttttccgccatttgcagcgattccggaagcaagtgctacggctgtctcttccgcgataccgacatctacgaactgttttcctgcttcttttctcttatcttctgtgaatcccataacagtcggtgttccggatgtgatcgctaccactgccggatcttttttcatcttctccaaaagataattcagggaaatatccgaatagtcttcttctgtcatctcgtataacggttcacctgtctcgatatgaaatggtccgttataatgccatacttctttgttctgctctgccggtgcataaccttttccctttaaggtattgatatgcacaacaactggtttcttgctgtctttgacactctggaatgcttcgatcagctctccgacgtcatttccgtgatccacgtaaatgtaatctaatcccatagctttgaacaggttgcattctgcctgtccgtttgtctcacggagtaattttaagttgccatataatccgccgtggttttctgcgatggacatatcattgtcatttacaatgatgatcagatttccgtctaattctactgcatagtccagtccttccagtgcttcaccgccgcttaaggaaccgtcaccgatcactgcgatcacatttccttcttcccctttcaggtctcttgcttttgcaagtccacacgcaaggctgacggatgtagatgtatgacctacagtgaaatgatcgtgtacactttcatttggattgctgtagccggacacatcatcgtaatgttcttcatagagatatgcatcctttcttcctgtcagcatcttgtgcggataggtctgatgtgatacgtcatatacaatcttgtcttttggtgactcgaatacataatgcagtgcgatcgttgcctctaccataccgaagtttggtccgaagtgtccgccgtggatactggctctctttaacagtgcttctctcatctcacctgccattacggtcatctcgtctacggttaatttctttacgtcttctggtccgttaatcttttctatatacatgaactattctcctcccagtttaatactcctgtctttactgcttcttcgtatttggaaattttgtgattcaaccggttgattgctgactctatctgcgctttctgctcttctaacttctctctttcttccgaaagaagctgaagtcttgcttcaaatgtctcgtcgccctcctgatataattttacatactcgatcagtgcctccacgggaagtcctgcttttctcatacagatcacaagctccacccatccaaggtctgattcctgatagtctctgattccgcctgccgtacgtgttacttccggtatcatgccgatgcgttcataataacgcagggtatcagcggaaatgtcatatgtttcacttacttcttttatcgtcaatccagacaccacctttccgttcattactatagcacttggagttcgctccaagtcaagattttttccaaaaatgtaagagtaaattccggattatacaattcatcctgtattttctgatatctgcagaagctgcatagcaataacaaaagccgtcagggaatataattctaattcatacattaacattccctgacggcttttctatttctattatttcttttaaattctcttcaaatcagcttccgtcaaccttacttctggcttctcagtctctcaacaaaccgactgagtcttccgatcgcttctttcagatcttccagtgagtacgcatacgatacacgcaggaaaccttccccgctctcaccaaacgcacttcccggtacgaccgcaaccttttcctcttccaggaaccgcattgcgaattcttcagaagtcataccaaattctttgatacttgggaagatatagaatgcaccaaacggctcgaagcattctaacttcatctttgcaaattcattgaccagatatcttcgtctctggttgtatgcatttctcatctgctgtacttcatcttcgcagtggcgtaagccctcgatggctgcatactggctgttggtcggcgcacacatgattgcaaactgatggatcttcagcatctgttctatgatcacagatggtccgcagatatagccaagtctccatcctgtcatggcaaatcctttggagaatccgttgatcaccagtgttctttccttcattcccggaagggatgaaatggacacatgctctgtcttatatgtaagttcggagtaaatctcatccgaaagtacatacagatcatgtctcttcacaacttcggcgatcggctccagatcttcttttgtcatgatcgatccggtcgggttatttgggaacggcattaccagcatctttgtcttcggtgtgatcgctgcttccagttcttctgccgtcagcttgaattcatttttctgctgaagcggaatcacaaccgggttaccgtctgccagaatcgtacaaggcacataagacacataacttggctgtgggatcaggacttcatctccctgatccagcattgcacgcagtgccacatcaattccttcacttcctccgaccgtcaccatgatctcatgatccgggtcatattctacatggatcttacgttccagatatttactgatctcaatcttcaaatccttaagacctgcattcgatgtatagaaagtcttgccctgttccagggtgtagataccttcctctctgattctccatggtgtgtcaaaatcaggttctcctacaccaagggatattgcgtccggcatctcacttaccaggtcaaagaatttacggattccagatggttcgatgcctgtgattttcttagataatggatttctcatcatggtgttataagcatcctttctggttttttctgcccgaacatgattgttccgtggtctttatatttctttaatacgaactgtgtactggttcctgtgacatcttcgatcggtgataatttacttgatacgaactttgacacttcctgtaatgtcttgccttcaatcagcaccatcatgtcaaaatcaccggagatcagatatacagccgatacttccggataattacagatccgttctgcggtcttgtcaaatcctgtgtcacgctgtggtgttacttttacttcgatcagtgcattgacgtactcggttcctgtcttatcccagtcgatcagtgtatgatacccacagatgatctttgctctttccatggctgaaatctcatttgctacggttacttcatcggttccaagaagaactgccagttctccgaggtctaccctgctatgcttctccagatacaggagtatctgctttcttaattcttccatcattcatacctccgctgtaaagcttcaagatctcatccggagccggacggtcgatataacgcatctcttctccatttcttaagatcttatcgttattgtctgttgtatgtccgattactgctgctgtaatcccctgattgttcagcgcatctgccagtacttccccattgtcagtcacagccagaaaacttcctgtggatatcatctgatacggattcagtcgaaaatgttcgcatacctcgatcgtttcctgtaaaatgctgatcttcttcatatcaagatccagtccctgattaagttccagggcaagattccacagtgctgccaagattccgccatctgcgacctgacgtacgacaaatgcgcccccggcttttgcggcttcgatttcttttggagcaaatatctgctgtccgtatgactttatctgcttcatgaaaaccggcgcaaaacgagtcttaagttcctgttctttttcttctgtgatcctgagcatgccatccattcccgcatgacccacgaatacgatgtccctgcaggctcgtgcggtttcccggttccaggcttcttccttcggtgcctttgcaattcccgtaacagtcactgcgatcacctgaactgccggattggcggatgcctgtaccgcaacaaggtttatgttatattttttacatgcttttttcagaagtttttcgatcttgtggattctggatttgaacacatattccggataggcaatctgtacactgacgcttgcagatgtttcgtgcgtatcctgcatatcctcgttctttatatctgtgtctgtttcctcgtcttctgttatatccgggcagacagaaaacactgtaccctgcgctgccagtgcatttgcagtctgtgcaagtgcgtgtacaccgatctgcggtgataatccgtagacggtaactgtttcacttataagctgttctgtctgtgtctctaacttcatgcttgttacgttccccttttatcttttatcttttattctcttcattcccagcattccgtacattcttactatgtctgcacgatggcagcacacttttctttatataagatgcttatacaagatacggaatgatcatcgttgccaccatggcaatgataacaataagtacaacaattgatacaattcttcttgttcttttattgttaaaattcattcttctaccttctttaattctattcccgttaccgattatcagtttttacgtaaacagtaacgtatttctctacattttatactctttacaatatttttgcaagaaacaatcctcacatttcggactccttgcactgcagatcgtacgtccgaatgtaatgatatgaatattccagagaatccagtgatcctccggcagttccttcatcaaatcctgttcgatcttgtccggatcctgattcttcgtaagtccgagtcgattggatatgcgctttacatgtgtatccacgaccacactcggcacgtgatagatatttccgcgaatcacattggctgtctttctgcctactcccgccagacttaaaaggtcttcaagttctgatgggacttctccgttatatttatcctggatgtctttcatacaggctatgatattcttcgctttattatgatagaatcccgttggtttgatatcctgttctaattctttcaggtctgcgtccgcaaatgcttcaacagacgggtacttccggaacagatcttttgttacgatattgactcttgcatcggtacactgcgcacttaacatcgtagcgatcagaagctgccacggagtttcataattcagataacagataaattctgttccgtatttttcatccagaagttccaggatctctcccgttctttttttcataattctatttccttttatattgatacttattttattctcactttatcaatttccactttacagaccctggcttcctgattcagcgggtttctgttctgataatcgaacaggatataggtatctgccagtttaaaatattctaaatgcgtcattttacgcatctgatttctgtcgtattttccataatccggaaggtacatatgtgtctcttcttctttttcataaaatgctctcgccacattcttttccaccagataatccccggcgaattccggacggctcttcgcattttcacgaagataataatcatatgtgagcacttcccggaacagatcttctttttctttatgatgaagccgtatataattcagcagtatctcatatctggcactccgcttgtgttgaacggcgttataaccattgtcttcgtaataagatgcaagccggtcatacatggtgaatgcagaatcgtattccttttccagttcttccatcgtattcgtaaactgacggctgttatagtagacctccaccatctcctcaatccctttcaggcgcagcacatcttcataggaaatccattttgtatacagtacttcatacggtgggtgcgctttatggacaatgccgtactcttcctgatgctcctgcataaaggatcccttaagcactttcaggaatcccagctggagctgctccggttttaatgcatagacatcatcaaaggaatgtgcgaagctttccacatcttcgtacggaaggccggcgatcagatccagatgttcgtgcacatttcccttattctgaattcttctcacgattttagatactttttcaaagtccataactctgtggatctctttgatcgtcttcggatttgttgactgtacaccgatctcaagctgtaccagtcccgggcgcatctgttccagaagttccagttcttcttcattcagaatatccgcggcaatctcaaagtggaagttcgtaatgccattatcatgctccatgatatatttccagatagcaatgctgtgatcgtgtttgcagttgaatgtacggtcaacaaatttcacctgcggtactttgtggtcaaggaaaaactgcagctccttcttcaccagttctatatccctgaaacgcagacgcttgtccaccgatgacagacaatagctacaggagaacgggcatcctctgcttgtctcgtagtaaatgatcttgtgttcaaaatcttccatatgatcgtagacaaatgggacttcgctcagatccatgatcggacgccacggattgtcgataattttctctttttcttcccggaaagtgattccgtccacaccctttaactggttatccacactctccgatttcttccaggaattatccacatttttatcctgatatccacatacattttctcttttttcgaattcatttcggtatatccggcagatttctttgaaagttttctctccttcgcctttcatcactcctttgacacatggaagccgtcttaatacttcttttgcatcataggaaacctccggcccgccaagccagattggcatatccggacgcagctttccgatttccagcacaatttcttctatatagtccaaattccagatatagcaggaaaggcagagaatatccggttgtctcttatagatgtccatcaggatatcgtccttttgctggttgatcgtatattctccgatctccaccgccggatcctcggcataggctttcaggctgtagaccgccagattggaatgtatatattttgcattgactgctgccagtaatatcttcattattctttcctccagatcagaatttttcccttcaggcatacacccgatcagataaattctcatatatctaggtattataaattggtatcgccttttttacaacatttccattgactttttgcccggaacacgttaaaatgttgagctgtgcagccggggtgttagcggtaccttgcacctgcaatccgctatagcaggggtgatattgcgcagagggcttgtttttgcagagctgcccttggaaagtgacgttgatgtttgggtcttacgcgacgggactccatgaaccgtgtcaggtcaggaatgaagcagcactaagtggaacctctcgggtgccgtaagggtgcctgggctgagttaactaccaaggtaacgtctgtgaaggctcgttcgaagcgcaatgcacataaataataatatagtattcatcttatccactgtgatttttcgcatgtgggtattttttatatacagaacctgccatggccggttttctataaaaatagagacagaagaatttccaaaattcctctgtctccgttttttatactatgccaaatattaacgccagcaatatcacaattgcatttgttactgtctgtaccggaactgccttcttacagaagtgctgtacatctgtctctgtcaatgcacatccaagataagttgatgagtttgtcggtgttgaactcgttgccagtgacaggttacatacgaacggtgcaatgatcgtcactgccggaattccaaatcctgccccgatagagatgaacaccggatacattgcattgaagatctggaatggaataaagtaaatgataatcacacataacagcagtaagatgatatgtatatattccagcatgaactttggacagatcttaatcagtccgtctgagacagctcctaccattcccgtattattgaatactgcctgatatacagagattgcaagcagcattacgataatgttcagatacatcggtccgactttaccaaatatctcaccaaaattctttggatagttgatcattgccgttacgaccgttgctgccataaataccagatatggaggcagactgaatacaccaagaccgaccatgaatacaatgaataagataaaattaatccagaaaagctttggccgtctgtatggattctcttctacttcttttgtctcctcttctacattttctacaactacgccaaatgttcccacacgtttcttatgcttgattccaaagtatacccactgcagaacgatggccgggataaaacataatgcccatggaaccgatgcctttgacagttcattggcagataatcctgcagaagatgccgtatatgccattccaatcccccacggaatgaagcacatcgcagacattgcagtctgtgctatgataaatgctgcctcacggtcaaaatcatatttcttataaagtggtaccaggatcgggaatgtgatcaggtacgccggtgtaaagtttcctgtcagaattgcaaatgctgcaattacggatgtcaggatcataattacgatgacattcatcttatcgccaagcttgttcgtcactgctgatacgatagtatcaaatactcctgcttctgtaagcatctgaaaatacagaaatgcaaacaataacatgaatcccgcagatttcatgatcgaactgaactgctccagtacaaagtcacttgtctcctgtaagctaaagcccaaaagtaacgagcaaatgatcggtacaataaataatacaaagttaaatggtactttcttcgtgacaaccgttgccacaacgatcaataccagaataatggccattacagtagcattcatagtctgcacctccttaattcatgtgtgctttcaggaatttttccacaatatccatattcttctctgtccagaatgccggatctccgtgttttgcattctctaccagatagaattctacttctttgtcttcttctcttaatttcttatacaggcggatactctgctccggtgctaccagatcatcggcaagtccgtgcatcatcaggaccggtggtatctctgtctctttttttacataattcatacaggtaactgcattggaaagttccggatattcatatacattcttcttaccgatcagcattccttccggactgtccggttctccctggttcaatgtagttgggaaatcttcttttatctgtacgcatgtaactccgtagaaatctacgattgcatttaccttgcaggaatattctccatatacatctgtgtccatcagctcctgatctgccgtaacccccgcaataaacgctgtattgccgccgcttgaatctcccattataaagacctgggacggatcaatacgatattcctctgcatgttttcttaagaaacgtacacctgtctttgcatcttctacaggagcaggaaatgtagcaagatcgctttctctgtattgaagaatcgctgtcacaaatccacgtcttgcaagatctgccattgctccaagccgtttatagttgtcctgttttctccatgccgatccctgaacatacaaaattgccggatatatctttggtgctttggcattcgtctctggtacgatcatctggagcgtacgctcaatcccgtctctgtttacatagcatacatcatgcttatatataccatatctctccgttccgtctgctgtgagtttctgaacctcttccatcccctcaatctgtgtccggaaatcttcaaaactcatatttttgatttcttcacttgtcattatccgtttcctcctgacccgtttttctatattgttaattttataactggatacaggtatcaggtcaagtgtactcatattaatacattttataattttcagtctttttaatcattttctattaattttttctattcttttctttctaatttcacctctttaatggcattttacctcactaaagtgcaaaaacctgagattaactctcaggtttcagtaatatatatattttcaaataattccaatcatttccttcttcatcatgtgtgatcttaatccttacacagtaagcatctcccggtatctttgcatcttgttgaaactttcggtatatctttcggattttcttctgcagcactccttccgatgcatacggtccggtaattttcagatacaggacaaatgctcttccgccttttatcctggtatatcctttttgcctgctccagacattttcatttttttcgatatcttctatatactctgcccgtactgcctgtccccaggagaactggttttccgttccattcagactttctctgcttatcttaagtaccgatttgctttccggtgcataatccatgaaattaatcccgtccgattcaagttgtgcatttttgccatattccaggttattcgtctgaaatctgatccagaaatccggcatttcttctatataccagtttccctgtttcttttctatctcttccgtctctgcaagataatccgtcacacgtttttttaattcctgcaattctgacagtgaagcatctatttcctctaatctttttttcaacagattatctatcgcttctgaatctgcttcctttatcagattcccgacctctttcaatgcgaacccaagattcttatacttcatacattcgtaaatatccgtgcatgcccttatatcgtaagacctgtaattcgaatgttctcttctcgtagaactcagaagaccaatcttctcataatattttattgtatgtacagacacacctgtaaactttgcaagcattcctactgtcttttcattcatatgatcacctgtcttttatatttccccggtctgttctttttccagctgctttttcttcttccttgcttctctcaattctttaaaaaatgatttcatcatctgactgcattcttcttccatcactcctgtcgtcaattctacctgatgattaaattcaggtatatccagaagatttaagatagagcctgcacagccggctttcggattcatacatccgactactacccgtgtcatccgggactgtacgatcgcaccggaacacatctggcatggttccagagttacatacatcgtacaatcctccagtctccagtcattcatcttcttgcttgcttttttgatcgcgatcagttctgcatgcgccagggtattattatcaattgttctgcggttatatcctctcccaatgatcttatcctgatatacgatcacacatccgatcggcacctcaccgatcgcatatgctttctttgcctgtttgatcgcttctttcatatatttttcatctgtgctttgcatattcattctccgtctattttcctgttttctatctcttctgtggttctacacagtcatgtgatcctcttatatccctgcaccagtatccgaacttctctctgtcattcttctcttcatctgtaagcttaagatccagctcttctgcaggaatgaattccggaaatccaaagctttctgcggctttttcttcctgcggatgatacactcccggtactcctaattttaaccggtcatcacggactgtcaatatcagatggtgataattataatacccgtggatcaaaaaactattatttgcatgtctccattcacacctcggaagacacaccatatctttacgctggatcttgcggactttaccccccaggcaggcctctttttccaaatcatcttcaagtttcccactctctgattcttcatcctgcacggtttccttcttacattccggttcttcgtcctgcgctaatcccttcttacattccggttcttcgtcctgcgctaatcccttcttacattccggttcttcgccctgcgctaatcccttcttacattccggttcttcaccctgcacgtaatcttcttccatcttccacatttccatcctgcagacgtttactacatcgtcattccagactgccgcataccagtgtccatttacgtcctttaatataattccgttgacaagatcataattttctttcttacagacatcctccggtgtatagcatagctgccagttcaccgccgggccgggaacctctgtcactccctgcgggattccaatacatttatcttctgtattccagaacagatacgccctaagtccctgcgcattttcttccatccggaatccttttccgtgcacatggatcacgcactgatccacatcctgttctacttttacgaagcctacattccgcatctttttctcttgttcgtattcatacagatatcgaataaaccgtctcaaaatatcctctcctgtttccggctatttatcacaatctattctgaaatattttcttttatgccataatcgcattcaattcctgatacagcctcttcgcatagctgtctgtcataccacagatataatccgtaaccagcagaagtctcagataaagacgataaacctctgatttttcttctgcatgataacgatatgcttttttataattattggaaataaatgaaatcagtctttcttctattgagttcagtttctgcgttggatcatcatattttattgctgcaccgacaaacctgtccagcagattatccagcatcaccgcctctttcacttccatacgatagatcgtctctgttttaaatacacatttgcacgctatctctccaagcagttttaccaatccttcagccaaagtacctgcaaacagatcttttttatacgtgccttccataatctcttcataatgagaagtaaatccggaagttgcgcagccaatcaaaaatccctgtgcttttacgatccagttcttcactgcataatcaccgggatcatctaccccgttcttctttgcacggtcgtataattctaccagtttatctgccgggcagaaccagttctgatctttctcttctgggtctgcatactttttctccctgttctgtagttttctgagttcatctctgagactatgatatgtaagaaatctttttacaaatgcatcttcaatatctgcggtcttatatgcaatatcatctgctgcctcaagtataaaggtaagtggatgtctgtgatttcccgcacccgtctctgatacaatatcctcgaacagttcccggtctgcataataatagcccatcttcttctctctgatatctcctgattccggatggatctttgtagatgctaccggatattttataattgtattcaaaagcgcatacgtcagattcattccattttcatctaccagaaaatgtaatttgctgaccagcctaagtgcctgtgcatttccttcaaaatgataaaaatcctccctcatctgaggttcgagcaactcctcaagtgacgttccatgatatgtcagaagcggaagatttctttcaaaccattccctgatcgccgcttctccataatgaccaaacggtggattgccgatatcatgaatcagtcctgcacactgaagaatattgcagatatcctctttcatctgtacagtgaaactggaatctttcttgtgtaccaatatgctttctcctatattctgacccagagattttgccagcgaagagacttccatggaatgggtcagtctcgtacggataaaatcacttttatccagtggaaatacctgtgtcttatcctgaagtctcctaaatgacgcactgccgatgattctgtgataatctttttcgaattcacttctcaggtctgcatcaccatatttttgactcttgtatctgttctgtctttgacgttttgttgataaaagccttgtccattccattttctgctcctccttcatattttaatctacaaaatttgccaccggaagttcctgtaggcggcagcttctcttgcatccccttgtacaaaaagtgtccagccggagatccggctgaacaccttattcataacattttctttctatgttcattcaacactaatccagatagatcggcggctcataatcttttccgagaagtgcctttttacgttcctgatatccaaggaatgcccactccgtcatatctgtccactgatgttttcctctgtcatatacctgtacatagccgattctcttcggatgcattcttacgctgtttgattcatattcatgtcctgtgtaaggattaagttcacctttactgagatcctcttcatcggatgtgaataagtcttcttcattttcctgcgcataccggctctgatatccgttattctcataaccggaggtctcatcagctgctgcatatgtttcctcctgttccggttcctccggcataaattcttctgcaagtttctctgactcaccgtctcccgaataatcaaactcatgatactggatttccggcttttcttcttttgccggttcttcatgcgctgattcttcttcatgctttttacgtattccgaagagcgctctccatccatgcgctttcttctccggttcaactttcttcggctccggtttttccggttcctctggctcttctacttccggttctgactcatgagctgactcctctgtatatttcggttccgactcataagccggctcctctgcatattccagctcactttcataggctggttcttctgcatattctggctctgcttcatacactggttcttctgcatactctggctctgcttcatacgccgattcttctgcgtattctggctctgcttcatacgccggttcttctgcatattctggctctgcttcatacaccggttcttctgcatattctggctctgcttcatacaccggttcttctgcatattccgattctgactcatacactggttcttctgcatattccgattctgactcatacaccggctcgtcttcatatacaggtttctcagcatactcctctacactcgctgcaggttcttcttcacttacagtcaccgactcttctgcttccggtgtcacagcttccgaacttccggtttcttccaccggctcctgtatctcttcttcctgctcttctatttctgtggcaggttctgctatcgcttctttctctcttacaaaatcaaatattgtttcctgaacatattccggatctggctctacaacctttttagacttcttctttttcttcttttctattgcatctaattctttatgaatatctacaagctcacctatcgtaatatctctttcttctgctttggcaggtgttttcttcttttcaggctctgtaattttctgggcctttgaaggcttctcttcatgctcctcatgttcttctaatatatccagataaaacggacactcaagaatctttgcgatcattcgcatatcctgctcctggaaattatctctgccaagacgctgggtcagattctgacgcgacatcttctttcctgtctgtttttctatcttctctgcaagttctttgatcgtcatccctttacggctcagaatgatcttgacctgttctccaaacgttaattccaacattcttttcctccttattattcttactctcccatactctcctcgtgtgctttttttatggttttgtaaacatttttctatcttgataaatctttatttttcccttttatattctaacaaatcacagaaaacacgtcaactctgcttacgttacatttccccgaaaataaaggctaaaaatgaagtttttcattcagttttttaacggtcttttcatccattttgactatttttctatcataagaaatgattccatttacctcttcttctatatccgataattgtgtgtaaacagttgcacttaatccacgtctgatattcggaataatgagcttttttatcaatttctcatagcccgccgtaagttctctttttctcttgaactttttataaccgtagacctttttctcgtacatactatgcttcgggatctgcagcgaatacccgccaaactcagtaagtgccgttaccctcttttccggtgttacatgcaaagggaagaaataatcatggatgcttcgtatatccccgcacccctgatcaaaccagccactcgcagaatctgtcagcctgtaaggatcttctgcccttactatatctgtcatcttcttcgtctgaaactgtccccatccttcattaaaaataacccatgtaacaatggatggatgattataaagcaatcgaaccgtctccttcatctctttttcaaactgtctctgcccggccggatcctgacgtcccatcagatgaatcctggtatcttttgcccggatatgcattccctccatggctgtcgccatatacgttacataccagctcttataatcccgtcctccgttcaccatatcctgccagaccagcataccgatacggtcgcagtgataataccatctctgcggttctatcttaatatgcttgcggatcatattgaaccccaggtccttcatcttctggatatcatagatcatcgcttcatcacacggcggtgtgtatagaccatccggccaatatccctgatccagtactcccttttcaaaatacggctcattgttcaaaaatatcctcggtattccctctttgtcatttttaacttctaccttacgcatggcaaagtaactttctaccgaatcctctcccatcctcacatgaagatcatacagaaatggatcttccggactccagcttctcatatgtgggatcatgatcacacacggctttcccgtctttccggatgctttcaccggccacatctttcttgccgttatcgtaacttcgtaatcaatatcttttatgccatgttcttcttccatctggatcattatagaagactggtcataaagaggtgtgatcttaagatgtccgatataacactctggaactttttcaatccatacggtctgccagattccactctgtgccgtatagaacatccctccgtttttaagtttctgttttcctctgctataataacaagtctccgaataatctcttacttttacggtcaacagattcttttcttcttttaatgcttccgtaatatcatatgaaaatggaagatagcctcccacatgctttccctgtttctttccatttatatatacgaccgcacactgatctaccgctccaaaatgaaggatccatctgcttcccttctccggctttacttcatccggaagccttctcttataccatagatattcttctggttttaactgtctgtttacccccgacaatacagcttccggcgaaaacggaaccaggatatccccatccattttctttggaaatccttttgtttctcttattgcatatttccatattccgttcagatttacatagctttttctgcgcatgagcggtcttgggtactcccctagtacattcttttcatttatattgtctgcccattttgtcattaactgtttcatgttcatacacccctttattaagcaagtctgacttcgtgtaatctcccctcgatctcattatctgtcgtaattaccgcgacccttgcgtccccctgctccagttcgtactccctgcacagatatttctccggatattcctcaggctgctttttcagatatggtatgccgtcctgtccccaagcaaattcatatgtgcgcatgtccaggcccattcctcttctggttgctttcataaagctttcttttaatacccagaagcggtaaaaccactccgcctgttctttttcatccttcccattgcggatgatctcacattcttcccggcaaaaataccgttctgccaccggcatccgcagctttcccttcatctccacatcacagcctgtctgaacatctccacggtcactacaggcacacaatacatattttcccgaatgtgacagattgaaaactgccgattccggaagtctcagagccttcttcatcttttcccacaatatccaggcaccgacactccttgctttgtcatccacatttttaagtttatccgctttatcttttctccactcaggcactttatcataatatgcctgatacgtctcttctattagtaatggtgtaatatctgctgcccaaacacttaccattttcccactccttttttactatacaattttagtctaacacacttttttaaaaatgaaagaatttatcgaataaaagtgttgacaatcaaatcccattgcgttaatatatcattagttttacactttaagtaattaaagttttgcagtgcgaatattttacagtgcgactatactagactcacacgggaaaagaaatatcacacaggcacaattatcatacatgttggaggatatttattatgattatcgtattaaaaccacgcactacaaaagatgatgtttctcgtgtcgagaacatggtcaaaaagagaggacttaacacacacgttgtacagggcgaagagatgacagttatcggttgtatcggtgacacagccaaagtcgattccaaattattcgaaattgattctgcagtcgataaagttatgcatgtacaggagccatacaaattagccaaccgtgcattccatccggaagattccatcatcgatgtatccggtgtaaaagttggcggcgacaacctggcaatgatcgccggtccttgttccgtagaatcttacgaacaggtacttgaaatcgcccaggctgcaaaagcttctggagccaacttactccgcggaggtgcattcaagccaagaacaagtccttattcattccagggactcggactggagggactcgacatcttaacatctataaaagaagcaacaggacttccgatcgtaaccgaactgatgtcagacaaatacctcgatatctttaacgagaaagtagatcttatccagatcggtgcacgtaacatgcagaacttcgatctgttaaaagaattaggacaacttgaccgtccaatccttttaaagagaggtctgaacgcaacttacgaagaatggatcatgtcagcagaatacatcatggcatccggtaatgaaaatgtcatcctctgcgaacgcggaatccgtactttcgaaagctatacaagaaatactctggatcttcagagtatcccggtacttcgtaaactgacacatcttccgatcatcgttgacccaagtcatgcgggcggcaaatggtggttagtagattctatggcaatggccgctgtagcagcaggagccgacggactgatgatagaagtacacaatgatccggaatccgcactctgcgacggagctcagtcattaaaacctaagaaatacgacgaattgatcaaaaaggtttcacagattgcaggtgttgtcggcaagacgatctaatgcagataacctgccactggcagttccttacgaacgcatggcggttcagacaaaaaccttacaggagtatatattatgaaacttacagttaatctgggaaaagacagttatcctatctatattgaaaacaacatattatcccaggccggagattacatccgaaagatctaccacggaaaacgcattatgatcatttccgatgacaatgtatttccgttatatggtgaccggctgatccatacattggactccacttacgaatgccaccatctggtacttcctcacggtgaatcaaccaaggatttccagacacttccgactgtctacaaggcaatgctggaggcaaagatttcccgtagtgatctggtcatcgctcttggcggcggtgtcatcggtgatcttgcaggatttgccgcttccagttatctaagaggtgtaagactggtacagatcccaacttcactgttggcgcaggttgattcttctgtcggtggaaaagtcgcagtagaccttccggaaggcaagaatctggtcggcgcattctatcagccttcactggtgctgatcgatccactggtacttaacacgctgaaggaacgatttatcaacgatggtatgggagaagttatcaaatacggctgcatcaaagatgcggatttatttagtaccttggaatcacacagttcttttgaagatttaaaagaagaactgcctgccatcatcacacgctgtgtagatatcaaacgaatggttgtagaaaatgatcagtttgacacaggtgagcgtatgttactgaatttcggacatacactggctcacaccattgaacaacatttccattatcagcgggaaagtcatggcgaagccgttgccatcggcatgtatcagatcaccaggattgccgaagaaaaaggattaacaccaaaaggaactgcagaacgtatccagaaggttttaaagacctacggacttccttttgaatgcggtctcactcttgggacattaaccgaagcgattgccttagataagaagaatctgaacggtaatctcaacgtcatactacttcatgaaatcggtgacagctacatcgaagctacagacattcagttctttgctgaaacagcaaggcttgtataaataacaacaattctacgaaccggccttatatggcacttcgtaatcagaaaataatgaatgtaattttggaggatatatatcatgggtaaattagaaggaaaaatcgcaattgtaacaggatcaggaaaaggaatcggacgtgacgcagcacttgctatcgctgctgaaggtgccactgtcgtaacagtagcaagaacacagtctgatcttgatgaaacagtaaaaatgatcgaagatgccggcggaacagcaatctcactttccagagaccttacagacggagaacaggttgccgacatggtcaaaactgttgttgataaatacggaagaattgatattctcgttaacaatgcaggcggatacccaaaagagatctacaaaaatatcgaacatcaggcaattaagatctgggaatggtcagaagaacagtgggatcagatcatcaaaacaaacttgagaatcccattccttgtaactaaaaatgttgtacctgtaatgataaaacaaggaaaaggagatatcgtaaatgtatcttcaagaatgggtcgtattgcatctcagatgggtgcatacgctgttgcaaaaggcggtatcgtaaccatgaccaagacaactgctatccagaccaaagaatacggaatcaaatgcaatgccgtatctcctggaatcgtggacacaccggggcagagagtctacaaccactctgtaggacaggacggctgcccgatgggaagctcaaaagatgttgcaaaagcaatcatctacctgctggcagattcaccggcagttatgacaggacagtctatcgacctgttcacaacagtatagaaccaaatgactacaagagacactgtcatcactggcagtgtctcttgtagtcacttcacaattattaacaattcgttcgtcttttcatcacactttcatcacaaattctctctatactataaattgttcgaaaaaacaacactttaaatctttttcataactttttcctcaggactgcactcctcccaaataatgcagtcctttttttatttaattttttaacacgattggtctcccggtccggatatccaccagcctaatgaattaaatgtcaaccaaatttatttccccggctgtccataataagcatttgctccatgttttctatagtaatgcttatcctgtaattcctgtggtgcaggtttaacgtctgggttgatcatttcgcatcttgctgccatcttggcaacttcctctaatactactgcgttgtgaactgcttcgtgagcatctttgccccatgtgaatggtccatggttcttgcagagtactgcaggtgttgcaacatagtccagatcatcttcatcaaatctgtctgcgatcaggacacctgtatttttctcataagcttcatcgatttcttcttttgtaagatttcttacacatggtactgttccgtacaggtaatctgcatgtgtagttccgtagcaagggattcctcttcctgcctgagcccagcttgttgcccaaggagaatgtgtatgtacaacaccaccaatgttcgggaatctgttatacagctctacatgtgttgctgtatcagaagatggatttaagtctccctctactttattaccctgaaggtctacaactaccatatcttccggtgttaatttgtcataatctactccacttggtttgattacgaaaagacctttttcacggtcgattccgcttacatttccccatgtgaatgttaccaggtcatattttggaagaagcatgtttgcttcatatacttctttttttaattcttccagcatctctttctatctcctttatatttctgttactgcggaaaagctgttatcaacattttccccttgtatataagaatatgcagatacggggacataacctatgccccctctgctttcatataatatttcttacagatctgcacaagctctgcgctctacgtcaagacctttcttgtatgtctccataaatgcttcgtatccagctacgccttccggatccggatcgattctgcttccggcatcgcttccgaatactttattcttcaggtagtcttccagcttctcgccttcttcacgttttaccatgtactcagcaaggatagccattccccatggtccgccttcgcctgctgtctccataactactacaggtgtgttgatcgcatctgcaaggatcttctgtccgacaccttttgtcttgaagagtccgccatgtccaagaacggtatcaatctcaacaccttcgtcttttgttaagatatccattccgactttgataacaccaagtgctgtgtacaggtgagatctcatgaagttagccagattgaattttgtctctggtgttctgactaccattgggcgtcctttttctacatttgtgataggctcgcctgcgtagttaccataagaaaggattccaccacagtcagcatcgccttccagtgctttattgtaaagtgttccatacatctgattcatgtctacgtctgctccgatagaatcagcgaattctttgaacagatttacccatgcattcagatctgttgttccgttattggaatgtaccatggcaaccagacttccgtcaggtgttgtaaccatgtcgatctctgtatgtaagtctttcagaggtttctcaaggacaaccatagagaagaatgaagtaccagcggaaatgttgcttgtacgctgtgctacgctgtttgtagctaccatacctgttcctgcatctccttccggaggacaaagcgggattccggcttccagattacctgtagggtcaagtttctttgctccttcttctgtcaggataccggctgcgtctcctgctaccagaactttaggaagaatctcttttattttccatggatagttctcaccttcgatgagtttatcgaacttctggatcatttcttcatcatagtcttttgtattcatgtcgattgggaacattccggatgcatctcctacaccaagaaccttctcacctgtcatctgccagtggatatatcctgcaagtgttgtcgtgaatgcgatatcttttacatgatcttctttatccagaatgcactgatacagatgtgcgatactccatctcagcggaatattatactggaacagatctaccagcacttcggaagcttttcctgtattgctgtttctccatgtctggaatggtgcaagaagctttccttctttgtcaaatgccatatatccgtgcatcatggcactgaatccgatcgctcccagtttcttgatcgttactccgtattctttctgtacattttctgccatatcgcggtagctgtcctgaagacctgcccagatatcgtccagagagtatgtccacagtccgttctcataacggttctcccatgtatggcttccggatgcgatcggattgtgctcctcatcgatcagtactgctttaattcttgtagaaccgaattcgattccaagatatgcttttccgctttcaatgatctcttttacattgctcattgtacgcttcctcctaaacattatattttaagttttcttaatatctccattatactatttttgcagggaaatatctatttcgatatcccctgcaaatataatcttttacctgtaattctttatttgattatttgcggtatgcaacgctgttccacaggagttcattcttgaactgtctgattgttgtatccttatcaatgtatacagcttcgattcccatgcatgctgcccagtcacccatctgctctgctgttaaatcataagagaatgctgtgtggtgagctcctcctgccaggatccatgcttctgttccaacctttaagttcggctgtggtgtccagaatgctgttgctactggaagttttggcattggtttctctgtcttcttgcagtctacatcgttgatgatcagacggaatctgtcaccaaggtcgatcagagatgttgcgatagccggacctgtcttagatgtgaatacaagtcttgcaggatcttctctgttacccatgctaagtggctgctctttgatgctgatcttgccatctgcgattgtcgggcaaacttccagcatgtgagcttccagaacgccttctttacctgatacaaggttgtatgtgtaatcttccatgaatgaagttcccttagcgtccttcattccctgagtcatgatcttcataacacgaaccatagcagctgtcttccagtcaccttctgctccgaatccgtatcctttttccatcagtctctgcattgcaagtcctgggagctgtttcagtccgccaagatctccgaagtgtgttacaactgcctgatagttattctcatccaggaatctttcaaatccaagttcgattccagcctgtactgctacatgctcacggaattctttctcatctcttccttcaagaaggatgtcatatttgtcatagtattcttctactaatgtgtcgatatcagcctgagatactgcattaacagcttctacaacttcatttacaggataagcatctacttcccatccgaatttgatctgagcttctactttgtcgccttctgttacggctacgtttctcatgttgtcagctacacgcataactctcacgtggctgctttctacaacacctactgctgtacgcatccatgatccgatctgtttctgaacgtcttcgtcttcccaatatcctgcaacaactttgcgttccatgttcagacggctgaagatgtgtccgtactctctgtcaccatgtgctgcctggttctcgttcatgaagtccatgtcgattgtgtcgtatgggatttcacggttgaactgtgtatgtaagtgaagtaatggttttctgtattcctgtaatcctaagatccatgattttgcaggagagaatgtatgcatccatgtgataacaccggcacagttctcatctgtgttagcttcgttgaatgtctttctgattacttcgtttgtgatcatggttggtttccatactacttcatatggaaggtttcctgatttgttcaatgcatctacgataatctttgaatgctctgctacgtgtgcaagacactcatctccataaagatcctgtgatcctgtgcagaaccaaaactgataattctttgtttttaacatgtttaattactccttttcgctcaaattttctgtttcatttacagcttcattatgtctctattataaaaatatggacttgttttctcaatttcttaactctgcacttttgggaaaatagttacctattccgacctccgttatgatataatctaaggagaatccaaggaggtattttatatgaatttatccgatttttgccgccggatcacaggacccgatacacggcttcttccggaaaaccataaattaggcgcaagacttgtctgtccggaatattccaaatccgttcaggaagtcaagacgtatccgttactcggtcaggaccgtagcttcttattatgctggaacttcgattctcccggtaacctgtatgcaacgatgatgccgtctccggagaatttctgctatcattattcctattcggaagggaaatatacgcagcttcacacgcatgattatctggaactttcctatgttgtggaaggagaatttcaccaacggatattgaataaagatgtagtctttcagaaaggtgatctctgcctgatcgacaaaaactgtctgcaccaggactgcctgacagaccagtctggggtcgtactttttatcggaattgccaacgatatgtttacggagatcatgaatgagaacagtaccccgcagaagattctttccttcctgcagtctgcattgttaaagcaaaaggatgtccagcaatttctgcatttccgaccatccgacggggcaagcgaatctctggacgacagtcttttgttgcttttgaaagaatcttattcgccggacagtggttccagatatattacaaaaggtctgttattccggatcttccggatcttaagtacacagtatgatttttctctttccaaagagcagaagcagacgatgaactggatcgtattcgaagagatttcggactatatccgggcacatttcagagatatcaccatccaggatctggtggatgaattccactatcaggaggattacttcaaccgcctgatcaaacgaaagaccggacttacctattccgcttatgtccagcagatccggctggaacgtgcggaacatctgcttgtgtcgactgacaagagtatcgaagagattgccgattcggtaggatatcataacaagggatatttctacaaattatttcaggaaaaatacgaagagacacctgcaagttacagacgtcatacaagataacgcacgcaatacaatgaagaagcacagtaatgcggaaagtgcgatacgtacccaccagctggaaagtgttccctgtgtggtgataagacttgagattgttcctttgatcagtacaccaaaaactgtaccaaatggtgttcctacaccaccgcttaacagtgtaccaccgataacggaagctgagatcgcatccatttcaagacctttggcctgctctacgaatccggaacagctgtttaagcagaagaggaatccgccgcatcctgcaagcagtccgtccagaacgacaataaagatcagtattgcgatgataacagtcggatatatgtatgccggaatgaattttccacgacggctgtatgatccgattgggagataaatcttataattagcccatgcaaggaatgtcttatttttgatagaaatcatatcagtactgatgattgatgtcataccacgtccaaagaacatacctgcaagtgatacgatgaatggctggatttcaagataagataccaggaatccctgaacaataccaaaaaggagtccgatcagaagtgcgatggcaactgccagaaatacaagtcctaccgccgcgacaactcttgtccagttttttcttccattccctgtttcactcataaaaaaagtcctcctataatatgtaaacagctaatggctattatacactaattatagaagaacttcttcattacttatataattttatttacgaaaatagttcgtttttttgcgattctaaatatccccgcgtctgtttctggatgctttcagtcgtgtcatggcacgggccatagaagcctgtgacagataatactcctgaatgctctgcttctgacgaagctgttcttcggcacgttcctttgcttcctctgcacgcttcacatcgatgtcttccggacgctctgccgtattaaccagtacagaagcacggttattcacgatctctgcaaatcccttggatacaaccgctgttacccactcaccgtcaggcttgcggaaacgcagttctccgatctccactgcgatgaccatgttctcatgatgagccagaatacctttctccccgtcgatcgtcgggatgaccagatattcacatttaccatcgtagaagaccttatccgtagatataattttcaatgaaaatgtgctcatactaagccactccttctgccttcgccttagcgatcacgtcttcgatcgtacctacattgaagaatgcattttccggatattcatccatctcaccgtcgatgatcgctttgaatccacgaacagtttctttcagtggaacatattttccaggaacaccggtaaatgtctcagctactgagaatggctgtgacaggaatttctggatctttcttgcacgggctactgtcatcttatcctcttcggataattcttccataccgaggattgcgatgatgtcctgtaactctttgtacttctgcaggatttcctgtaccttacgtgctacctggtagtgctcctcacctacaactgcaggctccaggatacgggatgtagaatccagtggatctacggctgggtagataccctgctcaacgatctttctggaaagtacggttgtcgcatccagatgtgagaatgttgttgcaggagccgggtcagttaagtcatcggctggtacatatacggcctgaactgatgttacagatccgttctttgtagaagcgatacgttcctgaagtgcacccatttcatttgccagtgtcggctgataacctacggctgacggcatacgtccgagaagtgcggatacttccgaaccagcctgtacgaaacgaaagatattatcgatgaagagaagcacattctgatgctctacatcacggaaatattctgccattgtaagtcctgtctcagcgacacgcatacgagatccaggcggctcattcatctgtccgaataccaaggctgtcttatcaagtacgcctgattctctcatctctgtccataagtcattaccttcacgggaacgctctccgacaccggtgaagatggaatatccaccatgctctgttgcgatgttatggatcagttcctggatcagtacggtcttacctacaccggcaccaccgaacagaccgatcttaccaccttttgcgtaaggtgtcagaaggtcgatgaccttgattcctgtctctaatacttcgacagcagggctctgctcttcaaagcttggtgcttttctgtggataacccattcttcgctgtctttaattggttctccgttatcgatcgtctctccaagtacattgaacagacgtcccagagtcttctcacctaccggcactttgataccagctccggtagcggtaacttccattcccttctgcagaccttcactggaagccagcatgatacaacgtgcgatgttgttacctacgtgctgggctacttccatgacgcaacgttttccgccattgtctacttccagggcatctttgataaatggaagttcttctctactattaaattctacgtctacgacaggtcccatgacctgtacgattcttccttttgtcatattactgctgcccactttcttttttattatttcgtggttattatttgttctgtatacagttccgccatttgcgaactttgtatcttacttccgtttctgcgcattggctccgccgataatctctgtcagttcttgtgtgatgtctgcctgacggacacggttataagtaatatttaattcgttcagcatatctgttgcactgtctgttgcattctgcattgcctgcattctggcattatgctcactgcagtaggcctctaccaggcatccatatacgataccgttgatgtagttcggaacaatgttcgccatcacactgtgtgtagatggccagaacaccatatcttcctgatacagtccggttccgacaagagccggcatatcttccggaaggaaggtcgtcttcttcataggaagaagcttctgttcctcggtctccgctgtcatagcattgatcatacgtgtgtatatgatgtggatctcgtccagatctccattcctgaactgttctaccatctccgaagaaatgactctcgatctgtgtaatgttggattctggacggtataacggaactgagtatccatctcaattccttccctcttggcaaagtactgtcttccggcttctccaagtacgaataatttatgctttcccggtttctttaacagttcttccgttgccttgatcacgttatgattatatgccccggcaagtcctttatcagcagttacaacgatatagccaatctttctttcctcagccgggatactctcacggccatcaaagaactggctgtgcatatccggcacatgccgcaaaattctggcgatctctgcctgcatggcatagaagaaaggttctgtgtcagcaagctttttcttggcctgtttcatcttcgaagaagagatcagatacatggcatttgttatctttctcgtctcttcgatgctggccattctttccttaatctcttttgcatttgccatagctacacccgcttatcttctttccttgaattcctttgctgctgcaagaatctgctctttcagttcatcatccagaactttcttctcatcgatcgctttgccgatttctttatgttctctgtcgaagaatgcaagcatatccatctggaattctttgatcttctttgtgtcaatatcaagcatcagtttattcgtagcgacacaaagtgtgatcacctgctcatgaagacttaacggacgtcccagaggctgtttcaaaagttctgtcagacaacttccgtatttcagctgattctttgttgcatcgtcaaggtctgaactgaactgggtaaatgattccatctctcttgcctgtgccaggtcgatacggacactaccactggctttcttcattgcctttgtctgtgcggctccacctacacgggatacagaaagaccaacgttaacggccggacgcatacctgcattgaacaggtcactctctaagaagatctgtccgtctgtgatagagataacattcgtaggaatgtatgcagatacatctcctgcctgtgtctcaatgatcggaagtgctgtgatagaaccaccgcctgcttcctcgcttaatcggctgcttcgttcaagcagtcttgaatgtaagtagaatacatcaccaggataagcttctcgtccaggtgaacgtccaagtaacagagaaatggcacggtaagctaccgcatgtttggaaagatcatcatatacgatcaatacatcttttccctgatacatgaaatactccgcaagtgctgttgccgaatacggtacaatatactgaagtggtgcacactcactggctgttgagcagaatactgtggtgtaatccagtgcgtcatgtgcttttaagtcatttacaagtcttgctacggttgatgctttctgtccgatggctacatagatacagatgacatcttttcccttctggttgatgatcgtatcggttgcaatggatgtcttacctgtctgtctgtcaccgatgatcaactctctctgtccacgtccgattgggaacatggaatcgattgaaaggatacctgtctcaagcggaacgcttaccgacttacggtcaacgattcccggtgcctcattctctaccggacgatatccgtcggctttgatctcaccttttccgtcgattggtgctccaagagcatctacgattcttccgatatagccttcacctaccggaatacctgcttttttacctgtacggcacacttttgtgccctgtttaatctctgaatcatctccgaacaggatacaactgatctcgttttccttgatgtcctgtaccatgcccttaagaccagtctccaatgtgacgatctcgccatacattgcgtggtcgattccgtatacggaggcgattccatcaccaacagagataacggtaccaacttcctgatctctgcttattacatcataattctttatctcttcttttaatatagagataatttcatctgagctgattgcactcaattccttcacctccatgttaattcgttaatttccgctctaagcggttcagacggccctgcacactgtagtcatattcttttccgtcaacctgcaggatgaatccgccgatcagtgccttgtcttctgccataacccatttgatgtctccggcaccgtatttcttcttgataaagtcacccatctgtttcttttgttcttcacttggaagtgctgtataacgaagatacactgtcttaactcctgctgcctgattctgtaactcttcgtatgccgcaaagatctgttctgcgatcgtcatcttttcatgatcgcagacaaccttcagaaatgttctcatttcttctgaaaatactttatcaatgatattgtgttttgtctcttttgtgatcactggattaaccagtgctgcctttaattcctgtgatgtttcgaaaatggatcctgcctcccggacagtttcttccgaaattccaagttcactcagaactttcgcatagcggagggctgccacctggcagaataccggctctgcttcttttctattcttcgctgtcatgggaatcacctgcatctttcaaaaactggtcatatgcattcacgccgcttatattgtcagcattctcaagtaatatcttcttcgcagcatccattgccagccctgcaacctgtgccttcatatcatcgaaggcctgttctctctcctgattcaggctttctcttgctgtcttcataaccttgtctgccttttcgttagcctcgttcaggatctggttgtattcctgttttgcatccagtttcgcctgttcgatcatctttgtggattcttcttttgctccattcaatgcatcttcatactgcttcttcagagcatgcgctttgtcctgctcctcattcgcgtggccgattccgtctgcaatcatcttttcccgcttttccataatgtccatgaccgggcgaaacaggaattttctgagaatcagatacagaacgatcaggttgatgatcgtcagtaccagattaaaatctattctcagcatatatctctacctgcctttcccttcttttaatctgttatcgtcagcaaacattatttcaaaagaaggacgatcagaagtgcgataatgaaaccgtaaatagcggttgcctctgcaagtgcacaaccaaggatcagggaagttctgatctttccgtctgcttccggctgtcttgcgatagcatctactgctttgcttgttgcgattccgataccaacaccggctccgatacctgtaagtactgcgatacctgctccaattgcgataattgttccactcataatttgttctccttttcttgtcttaagttttcttatactaaatgttgtaaatgtctgattcgtcttattccatctcttctgtcataaataatgcagttaagaatacgaatacatatgcctgtaataatccgtcaaatatatcaaaataaaaactaaacggtatcggcacgattaacggaacgacctctttgatcagttccatgactacaaatccgcctaacatattaccaaacagtcgcatacaaagcgacagcggacggatcacgatctccagtatcatgattggtgctacgatcggcactggctttgcaaaatgtttgcaccagtgaaccagaccatttctatggataccggaccactcgatcacgaacatactcataacggcaagtgcgattgttacgttcatgtcctttgtcggaggcttgaatcctaacagtccgatgacatttgatattgccagataaagtgcaaccgtcatcagatatggaatatagcccttgttttcttttcctataataccttcaaagaaatcctgtgcccagccgatcactgattccagcataagctgtacctttcccggtttctctatacttagattccttacgaatactatactgagaatagtaagaaccgccatgatgatccaagttacaacaacaccttcgtcaacagcgattcctccaaataccgggatcgtaaatacggtttcacagttaagttctttaacaaggctttcaacaagcttttccgtactatccccttccttcataattttttgctagtttacagccattttttgaaaatgtcaatcattttgtctaatggtcattttgcttaattttttattatttttttgtgtatttttacttttatttattttaatttttccgtttttctcatcaaatttccacgtcaaaatggtagttccaatcttcgtcctttttttcacaaggaaaatgcacaatttttatttttcatttcccgtctttttctacaaaacgatatttttcttcaattttcttcttgataaaatgtcctcattgtctcatctccaaaaaacgacattttatattaattgtatattgcattctccgtaaatagcggctctttatgcacctatagtatagaaaacctgctacctgccacttcttttgaacacatagcaacaaaaaaggagtgtaacaactttttttagccgttacactccttttttcgttatttaattttgtatctcaattttatatgtatcatcattcaaaattgatatatctgttctctttggtattttattcttttaatcgacgatgatccggtactgcagattctcatataaaagcttatttccttccatgatatctcccggcaacaatgctcttgccaccgtcttggtttcttccggatcatgcttaagtgcatcgacacgtctgagttctgcgtaatcaccatcaatcttctcgactacataaatacatgttaacataattttgcctccttttttctgtcttatcatcctgtcttttgtataagttggtttaattatactatctttaattcaaaaagtaaatttttctgtattgattattgccaagatttataataatatatacttatataaattcgttatacattacatattaaaaggagccttgcaatgaacgaagtggatttttcaaaagtgggattaaaaatgaaacaattaaggagtgagcgtggaatcactcaggaacaggttgccaaagatctgaactgtactgttcctttcgtcagtaatgtcgaaaacaatcgagcaaagcttaatttaagagttcttctttattactctaagctctgcaacgtatccgtggatactattctggatgccggaagagatattcctcctctggatgagaaagagcatcagttaaatgatgagatgctgaatgtattccgtggtttttctgtaacagcaaaagaaaagatcatcaagatgttacgcatctggcaggagaaataatctcctgccctttttatacccaagtatgcaagaggacctgccagcggccaaagcatccgtaatgaggctgccagtggcaggtcctgtagatttctatattttgttaaaaatctttaagcacaactgttccctgattccggctttcctgtacatcaatgattctctgattctggcttcctctgaacaccagtgttacatcttttaattcttccttgaattctccgtctatcagtacatcaatatacgacagcatctcctctgtcacatctgtatggacacatcctcccggaaccatatcacggtcaaaaagatacccactgtaacaccagatatctttctgcggataagtttctcttatcttcttaaggagctttaccagttccacctggttctccggttcgaacggttcaccacccagaagcgtaaacccctggacaaaaccagcccccagcaatcttaatatttctgcttctgtctcttctgtatagtgctggccgaatccgaaatcccatgtctcttcattaaagcagcctttgcagtgatgtctgcagcctgatacgaacaaactgactcttacgccgggtccgtctgcaatatcacactctttgatatttccgtaattcataatctgtatactctccctagtcactgatcatcatcttaatgatctcttcattagtctctttcataccatcttttccgagacgaccaatattctggatcgttgcctctactccttttgtaacgattccgtcaccggcatagaactgctgccctcttaaatacatattatatccaagaatcccggcatctacagatgaagcgatttttgcagcacaggatgcttttgcaccatcacataccataccggatacaattgccagagcatttaccactgtatggatcacttcttcataaccaccgccacaaagatatgctattccggctccggctgccgcacccgcacttactgcaccacaatatgccgacagtcgcccgattcccgtcttctggtggattgcgaccagattcgaaaggaccagtgcgcggtatgtcttttcctctccggattgtaattcatctgcatattccagaaccggaagagaacaggtcattccctgattaccgcttcccgcattgatcacaaccggaagctcacatccgttcatacgcgcatcggaacctgccgccgcacgtgcttttgctctggtacgtacatcgtttccataagtatccagaagaacacttccgatgtttgctccgtaatttcctttcaatccttcatccgcaattgcagaattatattctatctgacgtccgatcacttcccggatatcttctatgtccactgtatttgcaaaatcccagatagatttcatatccagaagacttctgtctgtcagtccttcttcgctttctcctgcgaccggtacattaagcaggatctctccattcttttctattcttacaatattcgtatgatagttggcaattcttacttttgccttatcttccccgtgaaatacctccacaataatatcaaatacacatccgttattgatatgttctaccgtaatctctgtatgttcaagaaattctgcgatttcttttgtctcttcttctgttaccccggagataacttccagttctttttctgcgtttcctgcaacaatccccgctgctgctgccgccggtattccttttaaatgatttgtattcggcacaattacactctttacattcttaatgatacttccgcttgctccgatacagactctgtccggcagacatcccagtacttctcttgcctttgcagccgcataagccagcgcgatcggttccgtacaccccattgcaggaatcagctcttcatttaaaatctgaacatatgcctgatacttttcattatcttttgtcattttttaatcctcctgtcgacattttcttttccccatatttttttattataacgcatgtccttttgaaaagctatctttatacaatataaaaaggcctttcaaaaagctttctcacttcttaaaaggcctttttactgtctttatatcttgcagttttacaaatgcaataccctgtccttaatctcctgcgtacgtccttgattccagaactgtgttccgatatatccacaggttcttcttgccacaaataacttatcctgatcctgattaccacagttcgggcattcccagatcagctttccattctcatcttctttaatctggatctctccgtcatatccacagcattcacagtaatcactctttgtattcagctctgcatacataatgttattgtaaatatactgcataacagaaagtactgccggaatattgttctgcatattcggtacttcgatgtaactgattgctccacccggtgaaagcttctggaaatcggcttcgaatttcagtttcttgaatgcatcaatcttctctgatacatgtacatgatagctgttcgtaatataattcttatctgttacacccttgatgattccaaaacgcttctgcagacattttgcaaatttgtatgtggtagattccatcggtgttccgtatacagaatagctgatattctctgcttttttccactcttcacatttatcatttaacttctgcattacctgcattgcaaatggtcttgctgcgggatcggtatgtgatttgccaagcatacgtacacacatctcataaagtcctgcatatccaagcgaaatagtggagtaaccattaaataataatttatcgatcgtctcacccttcttcagtcttgcaagtgcaccgttctgccacagaatcggagcaacatcggaaaccgttcccaggagacgttcatgtctgcatctcagtgctctgtgacataattccaaacgctcatccaggatcttccagaatttctccatatctccttctgatgaacatgcaacatcaactaagttgatcgttacaactccctggttaaaacgtccatagaacttatggcttccgtccggatttctctggctgtcttctaccgtcaggaacgaacggcatcccatacaaggatatacttctccattcttcatctctttcataatcttggcagagatgtagtccggtaccatacgttttgcggtacattttgctgccagttctgtcagatgccaatatttggaatcttctgtaatattatcctcatccagtacatagatcagtttcgggaatgccggtgtgatccatacacctttttcattctttactccctgcattctctgaatcatcacttcttcaatgatcatagccaggtcatcacgggttctgccttcttctacctcatccagatacatgaacatcgtcacaaatggtgcctgaccgttacatgtcattaatgtgataagctgatactgaattgtctggataccactctttacttcttctcttaaacggcgctctgtcaccttattgataattgtctcatctaaagcttctccgcattcttcacgctctgcgattacatttctgcggatcttcttacggctgatatcgacaaacggtgccagatgtgccagtgtaaatgactgtccaccgtactggttacttgctacctgggcaacaatctgtgtcgttacattacatgctgtaaagaagctgtgcggcttttcaatcatggtctcactgataaccgttccgttctgaagcatatcctgaagattgatcaggtcacagttatgctctttctgtgcgaaatagtcggaatcatggaaatgaatgattcccgcttcatgcgcacgtacaacctcttccggaagaagaacacgttttgacaagtccttacttacttctccggccatataatcacgctgtgtagagttgatcacaggattcttgttagagttctcctgattcacctcttcattcatatgatccagaagtgcaagaattccgttatctgttgtattcgtctttctcatcagttctcttttataacgatagcgcacatatttctgtgcgacttcatagccgcgcagttccataattccggtctctaccatatcctgtatatcttctacattgacagcatgagtggattcctcaattttctttgcaacgttgtccgccactgccataatctgatattcattcatccgatgcagtttgtcgacgtccttgtttgcacctttgatcgcattaatgatcttctccaggtcgaaggctacctcttcgccgtttctcttaattacgttcgtctttatttctgcgttcatgtttatccctctcttgtttttattgccgatgtagtatgtgctcaccctcaaatactactaaatattgttttttcaacatcatttccgcacaagatattgtgcaagtaatatgatactctataacaggcgaaaatgaaagaggtaattttgttaaaataaatgtttgaaatgtggtctaaattttggtgatatttttttacgaaatctgttgcatttttaattttgtgacgggtaaagtgtggcgcatagttaagaatacttaagacgcattccctgtattgatttttgcattcaaatatactgataatatgaagttgttgtgccgatatttcttcatttataaaattaatctctgtcaatcttaatccatataacaaattatcattttttgttgtttcgtaacatttgttacaaaccatttcctataaaagctatatactctaatcacaacataagttgtacaacaccagttaacaccaactaagttttaataaaaaggagattttaattatgaaaaaatatgtatgtgaaccatgtggctacgaatatgacccagctgtaggagacccggataacggaatcgcaccgggcacagcctttgaagatattccggatgactgggtatgtccaatctgtggattaggaaaagaggtatttgttgcagaagattaattactcttccgactgcagtctttcataatccgtgatctcgattaccttacggcctacaagacggatgataccttcatcctgcaaagtaagcagcatgcgcgacagagatggtcttgtagtattcagatatactgccagatcttccctgttcatatgcagacgaacccggtagtccggatcacagttttccaacaggtacgccgctacacgctgacgtaagtttccactggtaagaacctctatctgacggttacatttctctgctttttccgcaaaaagctgaagcatattgaagacaaccttactgtgatgtacacagtttctttcgcatcttccgccaaagaaattctgtgaaacctccagaaccgacacttcattttttgcttttgcataaccggagtaagcagactggcgcagaaacatttctacttcgccaaactcctcacccaccgtaacgtaactgctccgggtaatcttaccattcaagttgatactgccaagctcaaccattccttccaatatgaaatataattttaacggcacatcaccctgacggaaaatataggtatctttcggatatttctttactacagcctgtgaacagacaagacttttttccagttcttcttctgtcaggttctgaaatatctgtaactgttgtaacttcataatccaatccttttctctgctgataacaatttctatgattcattatagactatgcgggactgggattcaatgcgtatcaaagacaggaggtttctctatgaatattacatttgatgataacttaattacaggcaacaagaccatcgattcccagcatcaggaactgatcgaccgtatccggcagttcgttgcagcatgcgaatccggtgacagtaagatcaaagcaatcaaaatgttagattaccttgatgaatatacaaattttcattttcaggaagaagaggaacttcagaaaaaggtatcttacccggagttttccggtcaccatgcaaagcatgaagaattcaaaacatctattcaggaattatacgattatctgaatgaaaatgaagggcctgatgatcagtttatcgaacaggtaaagcgcaatgttgtagactggctgttccagcatatcaagacttttgaccggtctgtagcggaatatattcatttgaaagataattccaatcgattatagtgattcataaaaatgcacaaaacggacatgttctcataacaatgtccgtttttgtgatatacttaatttattatatttacaaaggattgtggtacttatgaatcagaaacttaccaaatacgcctggttactgccatttttctccggcatctgctggggtgctgccggaatctttgtccgtacactggaacacgatgggctcgacaacttttccatcattagtttccggatgttgcttgcagctctgatcactggcatatggattctattctataaccgacatttattttatgtacatcggcgtgacttctggctttttatcggaagcggcatgatcggcatgaccgcccttagtgtcttttataatatttccgttacgaaaggatctcttgcactttctgccgtgttacttgccatgtctccggtctttgttctgtttctggctgctatattcttccatgaaccgataaccagacacaaactgacctgtgtaacactcgccctcattggctgtgtgctggtcagcggagtactggaaagcaatggactttcctggagcataacaggaattctctgcggaattctggcaagctttttctatgctgtatatggaatcataagcaaaaaagtcacacaaaaaggatatcatttcctgacgattactttttacggcacactcttttccggcatgacaatgctgcctttcagtaatatacactctttaagcagcatgattgtctcagggcaaaggaccaccttttttatcctgattattcatgcgctggtatcatccgtcctgccttatgcactatattctttatccatgcgctatatggaggccggcaaggcatcgattctcgcttccagcgagcctgccgccgccatgttattcggagcggtactctatgccgaaacaccaggtattctttccatctgtggactttgttttacaattactgctgtaatattattaaattatgaaaggaattgaacatatggtacacctgaacgacaatgctattgcctatatgaataaacgcgaattccgcaacatcatactttccatcgaaacaatcaccagttgatgtgcccctccgcgtctggagatatcggtaggatttaccgataaagaaaaagaggacatgctcgcacaggggtatgtctgcgagaccagtcctcttggaaatgtctattatctgcctgatggggttactgtaaccggggatatcagcatcaattatatggaatatccctggattacatgctttgaggtaagcggtctggctgtttcacgttcctgagacagccagggagactgtaattaattctgtgtaaactctaaaagagctatatatcctcttggattgatgttaaaataaatatcaattcacacattatattttagtattctataaacctacgattttatcatcaatctgagaggtttacacagaataatttacactaccgaaatcgtttcacgccattcttattgtgcttcttcgagctctttcattctttttctgatcagttcttcaatccgttccagttcggaaatatcttcttcctgctcaatgaatgtagcaatcatagccgaagtagaactatttccaataatatttttatattccgcattgaaatatacatctctggaaatgagcggacggtaactgcggcttaataccgttccactgtatacaatatcggctatttctatcagattctcttttaacaggacacgaagagaagcctgtactgtattaatgttcatggaactttcggcttttacaatgtcggaagcaaccagaggagtgcctgcatcccagagtattttcatgacgtctaattgtttttgggacaaatttcgtatcattgtacattccttctttccaatgatatccggggataattttttgttgctctgatattattatagaagtaaatgcttgtgaattcaacaagaatatataataaggtattgtttgatttaaaataaattgacagattgtatatgcgatgatagattaattatataatgaaagaaagatgatgaaataatcataatgagaatgttaataaaataactaaataattttgttaaaacaacacaaaattaatgcatattaacgaaagaaaatgaaaaaagaattgtatataatagatgaaaagctaaaaaatgaccaaatgtcattgaaaaaaattgtgcactgtgatatagtaagcacagttgaacaaaggagctgagataggagagcgaatacaagtaatcacacgattacttttagtcgcgctcctttttttgaaaattatttcagaatataatagaataaatatatagcatagacgttcagcaaataggaatgaggatggaataagatgaatcagatattttacgatgcggtcggcaataatccgattattgcagctgtgaagaacatgaaggatatagaagtaagttgcacgatagaggagatacaggtgattttcatattgtttggagatgtctgttcgatagaccggatcgtaaagagagtcaaagatgcaggaaaggttgcgatggtacatgtagatctgatcagtggcctgagtccgaaagaagtttcggtagaatatctgaaagaacatacggaagcagatggcattatatcaacaaagccatcactgatcaagaaagcaaaagaacttgggatgtatacgatcctcagatattttctgttggattccatggcatttgagaatatcagacagcaacagcatatagtaagaccggatttcatagaagtacttccgggagtgatgccaagagtgatcaaaagaatctgcagttcgataaagacaccgatcatagcaggaggactgatcacagacaaagaagatgtgatggctgcattatcagccggagcaattgcagtatcatcgaccaatcatcaggtatggaagatgtaatggctgcatatgatgaaacagaatatttaattgcttatggggagcaattcaaatagaacgcatgcgaaaaaaagtaaccagtaaaagtaagagagaaatcaggaggaaatgaatatggcaaaatatgtaatggcgttagatgcaggaactaccagtaacagatgtattctgtttaacgaaaaaggtgagatgtgcagtgtggcacagagagaattcacacagtatttcccaaaaccgggctgggtagaacatgatgcagatgagatctgggcaagtatgcttggtgttgcggtagaagcaatgaatatgatcaatgcagaagcagaagatatcgcagcaatcggtatcacaaaccaacgtgagacaacaatcgtctgggacaaagagacaggagaaccggtacatcatgcgatcgtatggcagtgccgcagaacatcagaatattgtgattccttaaaagaaaaaggattaacagacaaattccgtgaaaaaacaggactggtcattgatgcatacttctcaggaacaaaggtaaaatggattttggataatgtgccgggagcaagagaaagggcagaaagaggagaattgttattcggtacagttgaaacatggctgatctggaaactgaccaagggtgcagcacatgtgacagattattcgaatgcttctcgtacaatgttatttaacatcaatacactggagtgggatgatgagatccttaaagaactggatattccgaaatgtatgttaccggaaccaaaaccatccagctgcatctacggagaggctgatccgtcttatcttggaggaccgatcccaatttcaggagcagcaggagaccagcagtcagcattattcggccagacatgttttaacgcaggagaagcaaagaatacatacggaacaggatgtttccttctgatgaatacaggagaaaaaccggtattttctaaaaatggcctggttacaaccattgcatggggattagatggcaaagttaattatgcactggaaggttccatcttcgtagcaggagctgcaatccagtggttaagagatgaacttcgcattattgattctgcaccggattctgaatatatggcaaagaaagtaaaagataccaatggatgttatgtagtacctgcatttacaggacttggagcaccacactgggatcagtacgcaagaggaactatcgtaggaatcacacgtggagtaaacaaataccacattatccgagcaacgctggaatcactggcatatcaggtaaatgatgttctggtagcaatgaaagcggattccggaattgatcttgcagcacttaaggttgacggcggcgcaagtgctaatgatttcctgatgcagacacaggcaaatatcatcaacgctccggtaaaccgtccgcagtgcgtagagacaactgcaatgggagctgcttaccttgcaggtcttgcagtcggatactgggaaagcaaagaagatgtcattaagaactgggcaatcgacaagacattcgagcctaagatcgatgaagagcaaagaagtaagatgatcaaaggctggaataaagctgtaaaatacgcttacggatgggcaaaagaagattaaaaactgaataaagatagatagaaaaaagggggaaatttctatgttaccttatatagctgaattcttgggaacgatgatactgattattcttggagacggagtggttgcgaatgtgaacctgaataaatccggaatgaagggcggaggaacggttcaaatcaccattgcctggggtcttgcggttatgctgccggcatgtatatttggagctgcatccggagcatcctttaacccggcgctgaccttggcactggcggtcgatggaagctttgcatggtctatggttcctggatatattgtggcacaattcgcaggtgcgttcgtgggtgcagcagttgtatatcttctgttcaaaggacagtttgacgcaacagaagatcaggcaacaaaacttggggtattctgtaccgcaccatccattccgaatcttggcctgaatattttcagtgaggcagtcggaacatttatacttgtatttgcaatcaaaggaatggcaaatgtgccagaacttacagacggacttggcaaatttatcgtattcggaatcatcgtttctatcggtatgtcactcggtggtctgacaggatatgcgatcaacccggcaagagatcttggaccacgtctggctcatgcagtacttccaatcaaaggaaaaggaagttcaaactggggatacggtgtcgtaactctagtaggaccggtaattggagctgtcgctgcggtattgctttatggagccattccgtggtagaataataaaaaaatagaataagaggcgtgagagaagagagcctggcaggataaccgcatattcgtgatgcgtttacttgtcaggctcttttttcaaaagcctacgggtatcagaagtgatgcctgggatatggaagacatatagaaggagagatggaacatgtatgatgtgatgataatcggaagtggagtatccggttcagcggctgcaagagaattgtcccgctataaagcaaaaatctgtgtattggaaaaagaagaagatgtctgctgtggaacgtcaaaagccaatagtggaattgtgcacgcaggatatgatgcaaaagagggttcactgatggctaagttaaacgtccgcggtaatgcaatgatggaacagttatctaaagatcttgactttccattcaaaagaatcggttcacttgtgatctgtctgcgtgaagaggatatggacaaattacaggcattatacgacagaggtgtggcaaatggtgtatcgggacttcagattcttaatagagaagaagtacttgagatggagccgaacattgcagacaatgtatatgcggcactctatgcgccgacagccggaattgtatgtccattcggattaaatattgcgatggcagaaaatgcctgtgaaaatggtgtagaatttaagtttgatacagaagtaaaagaactgaaaaagacggaagatatctgggaagtccacacgaatcagggcattttcaagacaaaatatgtggtgaatgcagctggtgtgtatgcagataaattccacaatatggtcagtgaaaagaaaatccacataacaccgagaagaggagactactgtctgctggataaaactgcaggcggacatgtaaagagaacaatctttgcacttccgaacgaattcggaaagggaattcttgtatcgccgacagcacatggcaatctgctccttggaccgacagcaatcgatattgaagaaaaagaaggaaccaatacaacaagagagggacttgatcaggtacttacaaaagcagggcagaatgtaaaaaatattccgatgcgtcaggtcattacatcatttgccggacttcgcgcacatgaagacggacatgaatttatcatagaagaattagaagatgcgaagggattcattgactgtgcaggtattgaatctccaggacttaccagcagtccggcaatcggagagatggttgcgggaattttgaaagaaaagcttcatctggaagaaaaagaaaatttcattgctacaagaaaaggaatcctggatccaaacactctgagtaaagaagaaagagtgaaattaatcaaagagaaaccggcatacggtaatattatctgtcgttgtgagatgatcacggaaggtgaaattatcgatgcaatccatagaccactcggagcaaagtcgttagacggtgtaaaacgaagaacaagagcaggtatgggacgatgccaggccggtttctgttcccctagaacgatggaaattcttgcaagagaactggaaatcccaatgtcagagatcacaaagtctggcgggaaatcaaagatcattgtaggagtgaataaggaggacatctgattatgaaaacatacgatatagtaatcatcggcggcggtccggccggacttgcggcagccgtatcagcaagagaaaatggaatccaggatatcctgatcctggaaagggataaagaacttgggggaatcctgaatcagtgtattcataatggtttcggccttcatacatttaaagaagaacttaccggaccggaatatgccggaagattcatcaaacaggtgaaggatcttggcatcgaatataaattgcatacgatggtaatggacatcagttcggataaaatcgtaaccgcaatgaatcgtgaagaaggattatttgaaatacaggcaggggcagtgatcctggccatgggatgccgtgagcgttccagaggagcactgaatattccgggttaccgtccggcgggaatctattctgcaggaacagcacagcgtctggtcaatatggaaggatatatgccgggaagagaagtcgtgatcttaggatccggtgacattggactgatcatggcaagacgtatgacactggaaggtgcgaaggttaaagttgtggcagaactgatgccgtattccggtggattaaaacgtaatatcgtgcagtgcctggacgattatgatattccattgaaattgagccacacggttgtggatatcaaaggaaaagaaagagttgaagggatcacgctggcagaagtagacagcaaaggaaaaccgatcccgggaacagaggaagaatacacctgtgatacattattactttcctgtgggctgatcccggaaaatgagatctccagaggtatgggcgtagatatgaatccggtaacttcaggaccgaaggtcaatgaaagtctcgagacgaatatcgaaggcgtattcgcctgtggaaatgtactgcatgtacatgatctggtggattttgtatcagaggaagcaaagactgcgggacgaaatgcagcagaatatgtgaagaacttacagtcagacacagacggtggggaaaagagcagtaaggaagatgcagcagatattacactgaatccggtagaaggcgtacgctatacagttccaagtacgattaatccggctcatatggatgaaaaccttactgtgcgcttccgtgtaggcggtgtatataagaactgctatgtaagcgcatattttgacgatgaacgggtgatacataaaaaacgtccggttgttgcgccgggagagatggaacagattaagcttacaaaagaacagcttatgaagtatccggatctgaagacgattacagtaaagatagaggaggcgtagaggatggaaacagtaacaacaagagaactgacatgtatcggctgtccgatgggctgccctctgaccgtgacaatggaagccggtgaagtgatcagtgtaacaggaaatacctgtaaacgtggagacatctatgcaagaaaagaagtaaccaatccgaccagaattgtgacttcgacggtaagagtaaccggaggagatgcagatatggtatcggtgaagacaaaagaagatattccgaaagggaaaatctttgagtgcgtaaaagcattgaagacagtagaagtaccggcaccggtgcatatcggagatgtattactggaagatgtcgcaggtacgggtgtagatattgttgcaacgaagaatgttggaacaaagagttagttattagaaagctggcgcagagacattgccagtagaaagttttatggttataattctatctgtgagaaaaatgaaatggatcagatatataaaggaaccgaggaagatagaatggaaccatactactatagtaaaatgaacaaagtacagcaggcagcctatcatgccatcaggcagggcttgcttgaaatctcagattcaatacagataccgggaatggaggcggaggaactctataacgtgttcttccgcctgcgcctggatcatccggaaatcttctgggcaactggatataagtacaaatattattcagattcgcctaatttcatattcatcccggaatatttatttgataaaaacaaaataaaagaacaccagaaagcactgaaatccagagtagaaaagctcataagaccggtgaaagacaaatccgaatgggaaaaggaaaagtatgtacatgattttatctgtgaaaatgtgcattacgataaattaaaaaagccatattcccatgagatcatcggaccgcttggacagggtgtcggagtctgtgagggaattgcaaaatctgtgaaagtactgtgcgatgcgctcggaatctggtgtatgatcgcagtgtgcgggaataatccggagaaaggaatcaaataccgtcatacctggaatatcgtaaaaatcggcggaaaatattatcatctggatgcgacgtttgacaatactcttgggaacggggagaagatgagtgacaggcaggcttcaaaagagatccggtacgactatttcaacctgaatgataaaagcatattcagagaccatgagccgcttattgctccggcaccaaagtgtgaagatggcgagcatttttattataaagaaaagaaactgtcatttacaaagacagaggatgtatataaaagagcactgcagacagcgaaaaagggaagagtgtttacattccactggcgcggcggttatctgacgaaagctgttctggatgaacttttggatctgatccagaaagcaggaaaagagaaacagaagaatgcaagaatcagtctgaactggccgcaggcggtgattcgttttgattatgtagaggatcatggtgaggcagaaccggaagttgtggttgaagaggcgaatgaaggagagaaagaatagtggatgcatttgtaatgttacaggagcttttggagcaggagcagtttgaactgatttttccggaaaaaaacggacagaatattcgtttggtctatctgatgaacgatgcggtggaaagctttcttgtatttcacaatgccagaatgacgggggaatacagggcagattataaaggaaagatatcggcatcgatgagctttgaagattcagaatacattctcgtggttcgtcagggagagtctgtcgtcacaatatttttcgaagatctcctgacggatgtgcatctgtatgactatggggagattggacatttctgggtaaaagagtatgaatacctgcgacaactggaataccgtctggcaatcatgagagataaatatgattatcttggagaggaatattgcacatcagaagaacagaagcttgcgatgctggtagattttccaccattaaattactgttgctatccggctgttccggagcaatatattgttccgagaatagaaccgtgggtaccgacagaagaggcaattgcagtgatggaagagctggtagtagaggcagatgataaaggtctgcagaagatattgaaaatttatcggaagcatccaaatccgcatattgcaaagaaaattgcggcaatgcttcaccggaacgcacatgccgaagtggttgatttgttgaatgaaagattgaaaaaggcggtgtcaggttatagaaaacgttcgtatggagaagaaatggatgcacaatgtctgaaattattgctgaaagtgaagaatcgtcagcagaaactgcaaaaagaaggaaaagaatcagttgttttaagagaggaacctttcgagattgcaaaggacagcatcggctatcagattcatctgatgatatgggaaaaaggaatcctgaatcgaaaagtgagaatagagagttattcgttagaaaaagaataatactttggcatacagagaacttgccaccggcaacttctcttgcatactttggtattaaaaatgggcatccacactggatacccaaaaggaaaaaagttatgaaaaagaaaaatgatatatataaactcggttgttgtttttttgtgaataaccgaaggattttttaggcgaagccagatcagataaaagctgattgatgtttctgatacctgagtgacttctttgttgttgttgattatatcatacattgtaaatgtttctaatttgtgttataggcctaaagaaaatatgaaaaatcttaagataatctgtaggaaatctaaaaatggatcataaaaggacgggaagttgcttcccgtccttattaacattaagtatgtaagatttaaaattaaccaacaatgcggtatttcttatctacagcattcagaagttcatgtccgtcttctgttacgagaacaaggtcctcaacacgaacaccgtatttgccttcgatgtagataccaggctcgatagagaagatcataccaggttcagccacattcttgttgatcgggcttacatcaccatattcgtggtcttcctgtccgatgaagtgtccaagacggattctccagtactcactgtatccagcttcgtcaatcagatctcttgcctgagcgtcgatatcgcagaaacgcataccaggtttgataacagcttctgctttctcaactgctgtacgaaccagatcgtggatagcagcctgctcatcatctacgctcttgcagtagaatgttcttgtcatgtctgagcagtaacctttccatacacaacccatatcgatcaggacacattctccggctttcagagttcttgtctcacttggtgtatggtgctggtcagcagcgttaggtccgaagcatacgattgtatcaaagcttactccgctagctccctctttcaggtactcagcgtcgatgaagtcagcaacttctttctctgtcataccttctttgatgaaattagcaactctttccataactgtatcattgatcacagatgcatgtttcatgatctcgatctcctcagcgtttttaacagcacgaacaccgtctacgcagtcagatccccatacagtcttcatctcagggcagcgctcctgaagtggaatgaggaaacgtgcaggccatgtcttgtcaataccaagagtgctctttgtatcgatgtgctccatcagaacaccgatctggtcatccatgtcactgaaccatacttcttcgaatcctgtatttgatacataatacagatagttcaggaataatgtatgttttccacttgttctaagtaacagggcatataatctttccccaggatttaccatgattcctgttaaaaagcggatgctcagtggatcagataccagtaactgatcaattcctttctctttcattttttccaatacgcggctaattctttcgtccattgttaaaatactccttcctgtgcgttttgttaaaaatcctatctaagataataacatgaattggctaaaatgactagaattttagtgaatttaaaggattaatttttgaaatgttctgacaacaatttctaatgtttatcatattgactttaatagaacaatgtgataatatattaaagataatgaatgggcattacacagtatggtaatgcccatttttttattgctatgcattcgtaaggagcatgttgatagcaaggtttataaatacgaaggtatacgtataagagtaattttttgagaatgctcttgtaaaaagagaggaagagggtaggaaatatgaaagaaaagaaaaaattatcactggctgcacagatattcattgcactggttttggcggtcgttgcaggattactgatgcagaaatacgcaaattttgcggaaacttatatcaagccatttggtacgatctttttgaatttactgaaattcattgtcgttccgatcgtactgttttccattatgtgtggaattatttccatgaaggacattaaaaaggtcggatcgattggagcaaagacagtcgtttactatatgtgtacgacagcatttgccattacattcggacttattggggcaaatatgttcaaaggagcatttccgaagattgcgacaacagatctttcttataaagcagatcagacgatctcactgatggatacgattgtaaatatcttcccatcaaattttgtatcaccgatggtggaggcaaatatgctccaggtgatcgtgacggcactgattcttggatttggaattatccttctgggggaaggtgaaagaaatacaagactggtaacagcctgtaatgatctgaatgatgtatttatgaaatgtatggagatgatcctgaagttatcaccgattggtgtgttctgtctgctgagtccggtcattgcttcaaacgggccggcgatcatcggttcactcgcgatggtacttctggctgcttatgtatgctacatcatccatgcagtagttgtatattcgtttgcagtaaagacaatgggcggaatgagcccgttaaaattcttcaagggaatgcttccggcaatcatgttcgcattctcaagttcttcatctgtcggaacacttccgattaacatggaatgcgtagaaaatatgggagcatccaaagaagtatcttctttcgtacttccgctgggagctacgattaacatggacggaactgcaatctatcagggcgtgtgtgcgatctttattgcatcatgctatggcatccatctgacgcttccgcagatgctgacgatgatcctgactgcaacactggcttccatcggtactgcaggagttccgggagcaggtatggttatgctcgcaatggtacttgcctcagtcggacttccggttgacggaatcgcactggttgccggcgtggaccgtatctttgatatgggacgtacggtggttaatattacaggggatgcgtcttgtagtattattgtttcgaatatggaacggaagaaagatgcaaagagggaaattgcaaacggactgtagactagtggaaccagttggaacggcgtgttgtgtcgtttttagtgtcccagtggctcgttataagaatgaaaataataggtgctttccagtatgtgtgctgggagcacctattattttgtgatttttaaagatgtttgggtgttgtccggtaattgggcaaaaaaataggactgcattatttgggaggagtgcagccctgaggaaaaagttatgaaaaagatttaaagtgtttgttctcttgaacaattacaagtatagagagaatttgtgatgaaagtgtgatggaattaggaagaaattgttaacaaatttagaacataaaataaaatacgatcagatgcaccataaaccgggacagtgttgaaatcaaaaagtccgggtgttagaattacaacagatgctatagcagaagatatataacagaaagatatcaaagaacacaagaaagaacacggaatatacgaacatacaccaaggaggaatacaccatgcggatcctaatctacggcgccggagtcatcggaagcttctacgcgtccagattcgccaaagcgggactggatgtaacagtcttagcaagagggcagcggttaaaagaattacagggacacggtctatggtacagaggcaagacaagaacgcataaagttgaggttaagacgatcagtgagttaaagccgaatgaccgttaccagtttattttcctgactgtacgtgagaatcaggtggaagaagcactggaagacatcagtaggaatgaaagtccgaatgttgtcactatggtcaatacgatcaaaccatatggcaggtgggagaaaatctgcggaaaaggaaggatccttccggcatttccgggagcgggcggctgtatcgaaggtgggattcttgatgcacagcttctgccaagagcaatccagccgacaacattcggtgagattggaggaagaaagagcagcagggaagaagcactggcatatatatttagaaaaagccacattccatatcagatcgttccggaaatgcatcactggcagatctcacatcttggcgtgatcattccgctggcagatgcttattaccagagcaggcatccggaaaaaatctgtgcaaatgaaaaattgatgacgctgacagcttatcggatgaaaaagaacctgaagtggatcgcccaaaagggaatgttgtgcccggcaaagctttatatgatcaaagatatgccgacaggaatgctggcaggggttctaagcagagtatatcagagtgaatttggcaacagatttctttaccggcatgcgatgcatgcaccggaagaattccagcggctgcatcaggaattctataattatatgaagacacatacgaaagagagtaacaaaacatgataagaccgattatgaaagacatatttttcctgaaccagagatccgagccggcaacagaggcggacaagcaggttgcagtggatttgttagatacattgaaagcgcacgaggaaggctgtgtcggcatggcagcgaatatgattggcgtgaagaaatgtatcatagccgtcaatatgggattcatgaatgtggcaatgttcaatccgaagattgtaaaacgttccggaaaatatgagacggaggaaggctgtctttcccttactggtgtgagaaaatgcacccggtatcaggagattgaagtggaatatcaggatatgaatttcaaaaaacagagacagaaatataccggatggacggcgcagattattcaacatgaggtagatcattgtcacggtattgtgatatagtcatgcgctggtgttgtatcattgacacaaagatatgtattaggattagtcataatattttgccgtaatatttcccactaccttattgacacaactgtatcaaaagcatacaataaaactagattgttaataaaataacacatgaaacgtgaagattacaggagggtaatatcatggcaaagattttatgtagtccaagtaaatatgtacagggtgcaggagagatgaagaagctgggtgaatatgctcagaagtatggcaagaaggcacttgtactgatcacggaatccggatacaaacgtatcggggacgttgtaaatactggatttgaaggatacgagatcacacctgtatatgagtatttcaacagagaatgcagtaagaatgagattaaccgtctggtagacattatgaatgaaaaaggctgtgatgtcgtgatcggtatcggtggtggtaagatcctggatacagccaaagcagttgcttattacaaagaagctccggttctgatctgcccgacaatcgcatcgacagacgcaccttgcagtgcactgtcagttatttatacagatgatggcgtattcgaagagtacttattccttccggctaacccaaatatggttctgatggataccgagattattgcaaaatcaccggtaagacttacggtatccggaatgggtgatgcactggcaacatattttgaagcaagagcctgtcaggcaagcggggcaacaacatgtgccggcggacaggttacacaggcagcaatcgcacttgcaaaactttgttttgacactctgatggcagaaggtgtaaaggtaaaacttgccctggaagcaggagcatgtacaccggctgtggaaaaagtcatcgaagccaacacattactgagcggtattggatttgagagtggcggacttgcaggagcacatgcaattcataatggatttaccgtactggatgagtgccaccacatgtatcacggtgagaaggttgcattcggaacgattacgcagctggtactggagaatattccggcagaagaactggaagatatcattgactggtgtatcgaactgggattgcctgtgacattaaaagaactgggaatcacagaagtgacggacgagaaactgatggcagttgcaacagcagcctgcgcagagaacgatacgcttcataatatgccattcgaggtaacaccggagactgtatgtgcagcaatcaaggcagcagatgcatacggaaaatatttcctcggagaatagtcaagaatctgtgaaaataaaaaatacataataaatacagagaatctgccattgacaggttctctgtattattttgcagaatcattctgtatatgaatctgaaaatttcagtagatttcaagaataacttaacatcttttttacaaaaatatcgagtaaattcaatattttcatactatacctgaaaatgtacaaaaaacaaaatcagaaagtgtgagaaatatctatgatcaaatcctatgttattgataccaatattttaatccaggcaccttatgcatgtcagtgttttgaagaaaacagggtgatattgccattggttgtattagaagaactggacggcctgaagaaagcagaaggagaaaagggagcaaatgcaaggcgggcgatccgttttctggaaaagctcagactgaaaggagaccttttaaaaggtgtccagatggaaaatggaggaatcctccgtgtagaggccaattgtgtaaatgtagaactgccggaaagccttccggaagataagccggataatcggatcttaaaagtatgtaagggaatccgggaagaagaaaagccggtcgttctggtgacaaaagatctggtccttaggttaaaagcacagattctcggaattgaagcccaggatttcagcacagagcaggtcatcgaagaagagggacagtacagcggcagacagatttgctatgtggcggaagacaagttcaaagaattcaagaaaaaaggcgttcatctgaaggaactttatttgtccgatgaagatggtaataagatccagccggaacttacggagaatgaatttatcatattgaaggcagatcagtctgtgaaaaagacacatcttggaagagttgaagggaagaaagtagtatcgttagaattccgaaagagccagccttatggcatcaaaccaaggaatgccggacagtattttttacaggaagcattgatgaaatccgcagagaaagcaccgcttgtaattgtaaaaggaatggcaggaacggcgaagacattttactcactggcagtcggactggagaaggtgctgaacaatccgaccggagaatatagaagaattctgatctgcagaccgaatgcgcagtttgaccaggatatcggtttccttccgggagacgagcaggaaaagatatcacctttgatgcgtccgatcgtagataatctagagcagctgattgattcggatgaagaagagcgttatcaggatgaacaggaattacagggcaagatcgaagagatatttgcaagaggactgatccagacagaagcaatgaatttcatcagaggccgttcatttgtgaagacctatctgatcatagacgaggcgcagaacatgactccgaatcaggtgaaaggaatcataacaagagccggaaaaggaacgaagatcattctgcttggtgatccgaatcagatagaccggccatttctggatgagagaacgaatggacttagttatgcgtcggaatacatgaagggcagtcctttatgttatcagattacaatgtctgcagaagaatgtgagcgttccgaacttgcgatggatgcgattcacagattatagacatagattatagaattagaagggaacgaaataaaattgagcaaagtaacatataaagcaatcaaaaatatgccggaggtgaatgcctatattgagcagggaaatagggtacttggagcacttgggtttaccgaacattccagaggacatgcagtaaaagtggcggaaactgccggaaatattctggaaaaattagggtataaccagcatacgatcgagcttgccaggatagcgggctatatgcatgacatgggaaattgtgtaaaccgtgtggatcatgcacatagttccgcgatcatggcatttcagatactgcgggatctgaaagcaccggatgaagacatcgcagtgatcgtcagtgcaatcggtcagcatgatgaggcaaccggcatggcagtggatgcggtatcggcagcactgatactggcggataagacggatgtaagaagaaaccgtgtgcggaacacgatcaaggaaagctttgacaaacatgaccgggtgaattatgctgcagtggcatccagtctgcatgtaaatgtcgaaaagcaggtgattctgctggagattgaactggatgaaggaatctgttctatattagattattttgagattttcttacagcgtatgctgatgtgcaagcgtgcggcagagatgctgggaatgaaattcaagatgaaagcgaacgggaataagatctgttaatcggatgtgacaaatgagggaaaattggaagatgatttcatagaactagtgattgacattcactgaaagacagtgctataatacaaccctaaaatgaatgtggatttttctggagcaatctatttttcgccacatggttactgagtagaagtaaccatgtggttttttgttgttacatattcagttgaaacaatctgtaacaagatgggaaaatagaaaaaaacattgcaaagatccgcaatagaattagaagattaatagatagtacatatgagagaaaggggatatatatggatcagacatatatgaaagaacaaccgatattaaaattgatcgtatcgatggcactgccgatggtcatttctatgatggtgagttcactttataatattgtagacagcttcttcatcgccaggatcagcgaagatgccatgacggcgttatcactggtgtatccagtgcagaatctgatcaatgcggtgatgatcggatttggaatcggaatcaatgcggtcatctcattttatcttggagcgcaggataaaaagatggcagacagggcggcaacacagggaatgctgctagggacgattcacggagtcggatttatgattctgggaattgccgtaatgagaccgtttttacagatgtttacgggaaatgcacagattgtggactatggtgtgcgttattcgagaattgcatttttatttgctacggcattatcttggcagctggtatttgagaagacgtttcaggcggtcggacgtatggtggagtcaatgacttgtatgatgtcaggtgcgattatcaacattatcctggatccagtcctgatcttcggacttggaccatttccgaagatgggaatcgaaggagccgcacttgcaacaggaatcggacaggcagcaggagcagtattgtacctgatcttttatatcgtgaatccgcttccggtgaaatacagaaagaaatatctgaaggctgatttgaagctgtggaaaaaattatatgtaatcggaattccggcaagcctgaacctggcacttccgtcgcttttaatctctgtattgaacgtaatacttacaggctatggggaagtctacgtattcgttctcggagtctactataagctgcagaccttcctctaccttccggcaaatggaatcgtgcagggaatgcgtccgcttctcggatataattacggagcaggagagcataagcgtgtacataagatcttccaggatggcctgatcctggtactcgtgatgatggcagccggaatggcaatctgtctggcagttccgggacagctgatgggattatttacagcgaatccgataacgatgaaggccggaagtgtggcactcagagtcagcagtcttggattccttgcttcatcggtatcggttatctgcagcggggcactggaaggtcttggaaaaggtgtgcattcactgatcatttcgttatgcagatatgtggttgtgattattccggtggcattcattgtcagccgttttatgggagcggtcggagtatggcatgcgttctggatcacggaagtggtgactgcggtgattgcgtatgtggtgtatcggaaaggcgtgaagggatagtagaagagatagcgaaagagatcatataagagcagagaatatcaagtaagaagtgggaagttaaaagtcagaaagaaagttttttcagatctgaataatctgaatgtgattacttctacatctcaggaatatgagaccagctttggatttacggaagaagaagtattttatgtccgatcgcatggaccattgccgagtcactgggagcggatccgagagccgtcgtcattgcagtgttcattgtattgccgatcttttatccattttattaattcctcaatttttataaatatgaacagggatgtcgtacgaaatgatgtgtgcggcagccctgttcttttgcgtaaaaagggcaggtaaagacagagaaaattgtaaaagaagagactacaggtttgcgttgactgactaattgaataaagagtataataaacctattgatacagacggagtgatcgatatctatccgaatgtaaagagaagaaaatacagggaagaaaataaaaaaaagaatgactctgactgcaaggtaagtcccgagcaggaatagttatgaattcgtttcattaaaaagtagttaacagcaggttatgttacagcacggtatacaaaatcaggcgatttctaacatgaaagagagccatttgggtatatcgtgctttattatatctaagtatacaagaaaaattttcaaaggtaagttttcagcaataagaacatgcaggaggaacacacatgttaaaagtagcaatctacggcaaaggcggcatcggaaaatctaccgtcacatccaatctggcggcagcatttgccacgatggggaagaaagtaatccagatcggctgtgatccgaaggcagattcgacgatgaacctgctcggtggggaaccgttaagaccggtcatgaattatatgagagaggaagatgaagaaccggagaaactggaagacattgcaagagaaggatttggaaatgtcttatgtatcgagacgggcggaccgacaccgggactgggctgtgcgggaagaggaatcattgccacattccagttattagaagatttgaaattattcgagacctataagcccgatgtggttctgtacgatgtacttggtgacgtagtctgcggcggattcgcagcgccgatccgggaagactatgcagagaaggtcctgatcgtgacatccggggagaagatggcactttatgcggcggacaacatttccaaagcagtgaagaacttcgaagacagaagctatgcaagagtattcggaatcgtactgaaccacagaaatgtggaaaatgagactgaaaaagtagagacatttgcaaaagagcatggatttgacatcgtgggagagattccaagaagtgatgaaattaaccgttgtgaagaccaggggaagacggtgatcgagggaaatccggagtcggacatcagtaaatgcttctatgatctggcggaaatattatggaaagatgaggaacaggtatgagagggactgcctattattgtacggtagaagaattacagaagcggggaagggatgacattccggagcagttccgttcgaacacgcatctgatctacagttctccggcgacgcttgcgttcaactcgccgggagcggaaggattcggtgtgaaaagggccgggcttgcaattccggattcgatcatgctgatcgtggcaccgggatgctgtgggcggaatacatccatgatcagttccatgccacagtatgaggaccgtttcttctatttgacgatggacgagacagacatcgtaacgggaagacatttgaaaaaagtaccgaaggccgtgcaggagatctgtgacagtcttgcgaagaagccgtcggttgtgatgatctgcattacctgtgtggatgcacttctcggaacagatatggaacgaatctgcagaaagtccgaagaaaagacaggacttccagtgagaccatgctatatgtatgccctgacaagggaaggaagaaaaccgccgatggtacatgtgcgtcagtcgttatattctttactggaacccaagaagaaaaaaggaaatgtcgtgaatctgctgggatttttctcaccgcttatggacgactgtgagttatacggtatgttggaaaaagcaggtgtaaagacggtgcatgagatatccagatgcaagaactatgaagaatatcagacgatggcggaggcgaatttcaatctggtattacatccagaagcgagattcgcagcagaagattttcatgagaaattgcagattccgtttattgaattacgaagattataccagatcgataagataacgaagcagtatcaggcactggggaaggttctggggattccattcgaagataaagaggcagaaagaactgcacttgatgcggtagaacgtttgaaagttgctaagccggatgccatatttgccattggagaatgtatgaacggtgatccgtttgaactggcactggcacttgtgaaatacggatttcaagtggcagagatctatgggacactgactgcagagaactttgtgtatctgaagcatttatccgaattaagtccgcagacaaaagtattttccaacatggaaccgaccatgatctattatgatcacaaagagagcggagtaaccactaccattggaaaagatgcctgctactatcatccggatgcggaaaatgtgatgtggaatgaagaagtacagccgtatggatatgcaggtgtgaagcatttgtgcgaaagactgttggaggtgtaggcgatgaaaggattaagaaaatatctgacaccatttgcaccggatcagtcgggagcagtgtcggtgttatatgaacttggcggaatgctggtcatctgtgatgcaggcggatgtacgggaaatgtgtgcggtttcgatgagccaagatggtttgaaaccagaagtgcggtattcagtgcgggacttcgtgatatggatgcgatccttggaagagacgacagactggttgcaaaacttgcagatgcggcagaaaagctggatgtgacattcgcagcagtgatcgggactccggttcccgcagtgatcgggacggattaccgggcgctggaacggatgctgtctaagaagacggatctttcggtcctgacggtgaatacggatggaatggaattgtatgacaagggagaagaaaaggcatatcttgcattgttcgagaaattcagtgacaagaatgaagagtctgagggtatgaatgataaagacagaccacgtatcgggattatcggcatgacgccgcaggatgtcagtgacctgaaggcagcagataagatccggaaagtatatgcagaccagggaatgcgtgccatctgctatggcatgggagacggactggatgaagtgagaaatgcttctctggcagcgaagaatgtggtcgtatctccggcagcattaaaagcagcgcagtatttgcaaaagaagttcggaacaccatatgagattgcctatccactggcatcagaacttgtgccggaagtgaattatcaaggaaagaagattctgatcgtacagcagcaggtgattacaaatgcagtgcgtaaggagatcgaaaaacgaaccggggaaaaagaagcaatcacaacagcgacatggttcatgcggaaagaggagattttaacggatctgaatgttgatgccgtagatgatattagtctgaaagaagaggatgatttcatttcgctggtggaaaaagaaggatatgatgtgatctttgcagatccgtgtatggagcggatgattccgggatttgaaggggtatttattccgctgacgcattttgcagtgtcaggaaagcttaacgtgtaagcaggatatatggggaacctatatattttagacaggggggaagaaacggatgataacaaagaaaatccgtgtctacggaattgtgcagggcgtcggcttcagaccgactgtgagccgtcatgcagcggctgccggaatcaccggaagtgtgtgtaacaaaggtccctatgtggaaatctttgcacagggagaggaaaaatgtgtaaaagattttctggagagactggaaaagcagccgccgaagagagctgccatattgaagatcaatacagaagatgtaaaagaggaagaatacgggaaattcaatgattttcagatcatagaaagtgagaagacaaaaggggagatttttgtctcgccggatattgcaatctgtgatgaatgcaagaaagaaatgtacgatccgaaagaccggcgttatctgcacccatttatcaactgcacctgctgcggtcccagacttacgatcctggatgcgcttccatatgaccgggaacggaccagcatgaaggaattcccgatgtgtccggactgtgcttcggagtatgaggatccggcgaccaggcgttatgatgcacagccggtatgctgcaacgattgtggtccggaagtgtatctgaccggcagggaagaacggggaagagctgcgatcattgccacaagaaaaatgatccatgatggcgggatcgtggcaatcaagggaatcggtggattccatctctgctgcgatgcgacgaacgaggaagcagtacagagactgcggacattaaagaaccgtccggcaaaaccgtttgccgtgatggcgcgggatgtggaagcggtaaagcaggaatgtctggtaaatgaagtacaggaggagatcctggatggacaccagaagccgatcctgttacttgaaaaacggaaaaaatctgcagacagtacaggtctttgcaagtctgtcgctccggggaatccgaaagtcggcatcatgctcccatacgctccggtacagatgttgttattccgatatgacgacgggatccagatgccggattatctggtgatgacgagtggcaatgcatccggtgcaccgatctgcagggatgacaaagaagcggtggaggaactgtcgcaactatgtgatctgatcctttctcatgaccggaagatccggatccgggcggacgattcggtgatggatttttataagggagagccttatatgatccggcgctccagaggctatgcgccgcttccgacgatggtgacgatgccgtggaaaggacaggtgctggccgcaggcggagaacttaagaatacattctgtatcggagtggatggacgtttctatctgtccccgtatgtaggggatctggaagatctccgtactgtaaaagcgttgcaagagacgatccacagattcgagacacttctggaggtagaaccggaagttgcagcatgtgatctgcatccaaaatacaactcgacagttgttgcagaagaactgggacttcccgtcgtaaagatccagcatcattatgcacatattttatcctgtatggcagaaaatgaccggaaagagcaggtgatcggcgttgcattcgacggaaccggatatggtacagacggaaccatctggggaggagaacttctgcttgcagattatcacggatttgaacggatgggaagtatcgaaccatttcttcagatcggaggcgatatttctgctaaagagggatggcgaattgcagtttcactgatctatcagcagacacaggataaagagcagacaatggagattgtaaagaagcttaacctgtgcagtgaaccggaatgcaaagtgatccttaccatggcggacaggaaaatgaatgctgtgacatcgaccagtgcgggacgtctgttcgatgcagtcagtgcaatcctcggaatccggacgaagtctacgttcgaaggggaggcttcgatggcacttgaatttgctgcagaagcttatgaggaagagctgagggaaattgatgagccggcagatggtgaaagcgatccggatgaagaaaagaaagagccggaagaaaggctgattatgaagacaggaagccttataaaatatctgacagagaagaaaacagaaggcattcaggcagaaaaattagcttatatctttcatcaaaagttggcagacctcataactgacggctgcaggaagatcagaaagaaaacaaaatgtaattgtgtggcattaagcggcggtgtattccaaaatcggctgttgttgagaatggtggaagaaggtctggaaaaagaacattttaccgtactcaggcatcacctgatcccggcaaatgacggtgggatcgcactggggcaggcagcatatgccatgcagtatattcaggagggaaaataacatgtgtgtaggattatcagcaaaagtagtccgtatcagtgacggtacggcggttgtagatgcggggggcgcaaaaagagaggtctcttcagaattactggaagatctggaaccgggagactatgtaatggtgcatgcaggaattgccattgcaaagatcaccgatgaagatgacagtgagacagagcagttgatggaggaacttctgtaatgagtgaaggaaagaaaacggcaagacagatcatagagggatacgatggtccggcagtacggatcatggaagtatgcgggacacatacacatgaaatcttccgtctgggtatccacaaacttcttccaaagcaggtagaattgatctctggtcccgggtgtccggtctgtgtcacaccggtaagttatatcgatgaggcagtttatctggctctggaaaagagtgtgacaatctgtacattcggagatctggtgcgtgtgccgggaagtaagaagagtctggcagatgcaagaagcgaaggcgggaagatccatatcgtctattcacctgccgatgcggaaaaatatgcaaaagaacatccggaagaagaggttgtattcttatctgtaggattcgagacgactactccggcaggatgtctgtctgtcaaaaaagcaaaagaagaaggaattacgaactattccatgctgatcgcaaataaaacgatgccgcaggcatacgaagcattaaaaggaagcgcagacattttcttatatccgggacatgtcaatgcgatcacaggaacaaagctctgtgaagaattggtgcaggaaggtgtaagcggtgtggtggcaggctttacggcaaaagaacttctgactgcactggcagttgctctgacacattttcagaaagggaaacctttctttgtaaattgttatccgcgtgtagtgacagaagaaggcagtaaggaagcgcagagactggtggatacgctgatggaagcatgtgacagtgaatggagaggactcggaatcataccgggatccggacttaggttacgtgatgaatgggacatgtatgatgccagaaagaaatatcaggttccgaagatggaaggaagggcgaatccggcctgtagatgcggggatgtattacagggaaaatgtaaaccatccgactgcaaagtatttggaaaggtctgtacaccgcagcatccggtaggtgcatgtatggtatccggtgagggagcctgttcagcatattatatgtatggaagagaataagaaaaacagacggaaaatagcaaggaagtggacaaaatgaacgagtatgtggataacgaagcaagaaaagcgaaattagtggggaaaactgtgacgatggcacatggtgcgggaggacgccagacgtcagagctgatcgatatgatcttcaaagcacattttgataatccggatctgactgcggatgatgcggcagtcctgacgccgccgattggaaagatggcagtgtctaccgatggatttatcgtatcaccggcattctatccgggaggaaatatcggaaagctttccatctgcggtacggtcaatgatctttcctgtatgggagcaaaaccattatacctgacctgtgcatttgtgatcgaagaaggatttcctatggaaaaactggaagagatcgcagaggcaatggaaaagacggcgaaagaagccggagtccggatcgtatcgggggataccaaggttgccggaaagggccaggtggacggagtctttatcacgacaacaggtatcggtgagatcacggatggagttgaagttgcgggaaatcttgcaaaaccgggcgatgcgatcattgtgacaggagatatcggaagacacggatgcacgatccttcttgcgagagaagattttggaattgaagcagatgtgaccagtgactgtgcacctctctggggcaatgtaaaagcagtgatggatgcaacacatgaactgcatgtgatccgtgatgcaaccagaggtggagtaggaactgtgctgtatgagattgcaggacagagtcaggtaggaatccgtctggatgcttcgaagattccggttgcaccggaggtacgcggcgtatgtggaatgcttggcctggagccgctctatcttgcgtgcgaaggacgacttgtgatcatggcaccgaaagaacaggcacagacaatcgtggatgcattgaaagcatgtccgtattctaaaaatgcggcaattatcggtgaagtgaccgaagaacagcctggaaaagttgtgatgttgacggagattggaacgcaggcattacttccacagccgggaggggaattactgccgcgtatctgttaagcatggaagacaaagcagacataaagcatgaaaaagtgaggaaatctatggatacaagagtggcagttatttcgattattgtggagaatccggaagcgatcgagacgttgaatcatctgcttcacgaggcagggcaatttattatcggaagaatgggaattccgtaccgggagaaagggattaacatcatcagcattgcgatcgatgcaccgcaggatatgatcagtacattatccggtaagatcggacgcctgaacggggtatccacgaagacggcatattcgaatattattacgaaagcaggagaatagaacattcggatattatttatgagagcaggagagcaagaataatatgattaagattgcagtatatggaaaaggcgggatcggtaaatcaacaacggtatcgaacgttgccgtggcactggcagaaaaaggcctgaaagtgatgcagatcggctgcgatccgaaagccgattcaacgatcgcattaagacacggggaagcagtaccgacggtactggatcttttccgggagaaaaagcaggatctgaaattggaagatatggtgcggaccggatatcagggtgtgatctgtgtagaggcaggtggtccgacaccgggacttggatgtgcaggaagaggaattatcacggcattggaaaaattaaaagagacgggagcatatgaagtatatcagccggatgttgtactttatgatgtactcggagatgttgtatgcggtggattttctatgccgatgcggaaaggatatgcggataaagtttttattattacttcaggagaaaatatggcgatccatgcaggagccaatattgcgatggcggtagagaactttaagaatcgtggatatgcttcccttggcgggattattctgaaccgcaggaatgtagcgagagaagaagaaaaggtaaatgagttggcagatgattttcagacacaggtagtcggaacattgtcccacagcggacttgtgacagaagcagaagaaaagaaagagacggttatggaatgctttccggacagtgagatggctgaggaatacagaaaacttgcggaagcaatctatgagttgtcaaaacgaccagaaggatcagcctgtgaaaaagccgatgaaaagtatactgccgataaaagacctggggagggattgaaatgttaaagaaagccggagaatcaaccgggctggaattcaattccccggcacatggaaactggaatattgttcatacaggaatgcttcttccggaatccatacagatctatgtctgtgcagataactgtatgcggggagtcgttctgacagcagccgagatgaatgcggcagacagattttcctttgtgatcgtggaagaagaggatcttctgaacggcaatctggaagatgtgacgatcgaaggcgttacagatgtattaagaaaacgaaaagatcatccgaaagcagtattgttatttaccgtgtgtctgcatcattttctgggatgtgatctggaacgggtgtatgaagaactggaagccagattcccggatattttcttcgtccgctgttatatggatccaatcatgcaaaagcacgggctgacgccggatcagaaacttcgaaaggcaatatatgacggacttaaggtgagagaagaaaatccgaaagcagtgacgattcttggcagtgattttgcgctggatgagaccagtgatatcaggcgtttgttaaaatggaagcatatagaagtaaaagaattgccagagtgtaattcatggaagtcctatcaagagcttgcagacagtaaaatattcatagcgtgctatccgcctggaaaatatggtctggaatgtcaggcagaacgacttaggaagaaagcgttatatcttccgggaagttttgattatgatgagattatcaggcagtggaagacgttggagcaggcggttggagaaaatgtggaagaggttgagggtatagaagatacagatatgcacatggagaaatcactggaaagaattacaaaaagagagattgcactgtgtgaatctgctttagaacaagccagaaaagtggtcggagatgtacccattatgatcgatcacacctttcatccaaggccgctggaactggcaaagctgttactgacacagggtttttctgtgaccagaatctatctggacgcggttaatccggaagaaaaagacacatttgagtggctaaaggaacaatatcctgaactggaatatgaaccaacgattcgtccggagatgcgtatgaagccaagaaacgaatcagatgtactggcaatcgggcagaaagcagcgtggtttacaggaaccaggcattttgtcaatctagtggaaggtgcaggactgtatggatttgacggaatccgcagaacggcagaattgatgacagaagcctggcaggaagaaaaagatccagaagatctgatcattcggaaaggatgggggtgcgaaagctgcatatgagacagagttacagaattataccgatttacacagctgacgtatctggtgtctgctctgccctgtatgaattgggcgggatgacagtgatgcatgatccgtccggttgtaattccacttataatacacatgatgagataagatggtatgagcaggacagtatgatctacatctcaggactgacggagatcgatgctgtcatggggaatgatgagaagatgatctgtgatattgaagtggctgcagaagaattaaagccgaaattcatcgcacttgcaggatcaccgatcccatatatgaatggaacggatttcccggcaatcgccaggatgctggaacaagatctcggaatcccggcattttcgattccgacaaatggaatgcatgattatgtatatggtgctggtctggctcttgcagagattgcaaaacgtatcaaaggaaagaaagaagtgacgtcaaaaagtgtgaatcttctgggagtaacacctttagatttcgggccgcaggagcatgtagatgttttaaaaagaaatgtagaagagactggatggaaggtattgtcgacctgggccatgggagatacactggaagatctcggacgtgcaccggaagcggaggttaatctggtggtatcttctgtgggactttgggcggccaaagtattacaggagaggttcgggacaccttatgtgattgggacaccgatccggggatttatgaagagtcttttgaatgcaatagaagaaaaaaagcaggtagcatatctcgaaaagggaaggcgcatcagcctgacaggaaacaaatcggaaaaaagttcagaaaaccagattatattaatcggagaaccggtgatcatggaatctttggcagtagcgatcgagacggaatatcagatatctgtaagagtaatctgtccgataagggagaagaaaggattacttgcggatggagatattgcagtccgtggagaagaagaactggaacaggtacttcagagatcaaagaatgtaaaaggcattgtagcggatccattgtatcgcccggtctgtctggagaatgtggcattttatgagctgccgcatattgcattttcgggaagaatttataaaaagaaactgccggtcctggcagaacttatataggtgacagataagtaaaacatatgttcgaataaatgcttgaaggatttatttgttcatgatagaatgtgaaatataaattgccggatatttctgagtaaatgtccggtgcagagaaagcgagtagaaagggaacagaatgggacatttttattttgcaagacacggacagacagtctggaatgtagagaataagatttgcggagcaacggatattgaattgacagaacttggccatcagcaggcagaagaactggggcaggcaattctggagcagggaattcagattgatgagatattgtattcaccattgatcagggcaaaggagaccgccagacatgtatccgaggtaaccgggattccgatgcgtgaagaaatgcgcctaaaagaacaaaactttggaaaatacgaaggtacgccgagaaatggagaggaattccagaaggctaaggctaattttattaattcttatgaaggcggcgaatcgatgctgaagctttgccaccgaatctatgatctgctcgatgatattaagaaagaatcagatcagaagacatatcttctggttgcacataacgggatctcaagagcgatacagtcttatttttgtgatatgacgaatgatgaatttgcaaggttcggtatcaaaaattgtgagattcgtaagtttgaatacgaggagtaagaatgaagaaggatgaaaagatgtcaatcgaagatatgacggcatatatgcgcattgtgccggagaggaaagcttcttatgcagaatttccggatactatgaatgatgaaataaaggaatatctcagaaaacaggggattaatgctctttatacgcatcagacggaaatgtttgaaaaggccggacggggagagaatacagtgatcacgacatcgactgccagcggaaaaacgctggcatttcttcttcctgtcctgcagaagatattggaagatccactcacaagggcgattttcgtctatccgacgaaagcgctggcgagtgatcagtaccgttcattgcagccggtactggaatatttcggagaagggaagattcaggcaggagtctatgacggagatacgatgcccgcagagcgcagccgcatcagaaagagtgcgaatattatattaacgaatccggaaatgttgaactctgcatttcttccgaatcacagtaagtatgggtttgactttatctttgcaaatctgagatatattgtgatcgatgaattacacagttacaggggcgcatttggtgcccatcttgcgaatattttcaggcggatgcacagaatctgccagtattatcattcaaacccccagtttttatgcagttctgcgacaatcgccaatccggtagaacttgcaaaaaaagtatgtggcactgcattttctctgattgagaaggatggatctccatcaccggtcagggaatatagaattatccagccgccggagatcaaagggcataacgacaaggtttatggaaggtatgcggcgtctacggtcgcggcagatatgcttccggatctggtaaaagagcagaggcattttattgcatttggaaaatccagacgaacggtagaagttattttgaaagagacaagagacaagttggatgcggcaggtttcttaagtcaggcagatagcagaaaaattgccggatacagaggcgggtacacacctctggaacgaaaagaaattgagcggaagatgatgtccggggaactgaacggactggtgtcgactaatgcactggaacttggaattgatatcggaagcctggatacgacggtaatcgtcggatatcctgggacgcgggcatcattctggcagcagagtggccgtgcagggagaaacggacagacctgtgtgaattacctgattcttgaaaatcagccatttgaccagtacattgcagtggaaccggggtggctttttgaaggaaaaagtgaaaatgcgatcgtagacccggataatctgctgattgaattggcacatatccgtgcggcagcggcagaacttccactgagtctggatgatgcagcattgtttccgagtcttggtgagatcattcctgttctgatgaaagcagaagaagtaaaaagtatggccgggagatttgcctggtcgggtcctgcatttcccgcaggggattacagtctgagaaatatggataagacgagattcaaattaattctggataatgaaaatcgtgagattacagagatggatgagtcgcaggcctatcatgaattacatccgggagcagtctatatgcatgacggtgcattgtatgaggttctgaaactggatctggtaagcaggacagcaacggcgaaaccatttgaaggaaattattatacagtcccggcaggaaccgaagacatccggatccttcagacttttcaggaaaaaacagtggaaagaacgaagatacatttcggagatattaatgtagacgaagtgatctcgatgttcaagaaattacagtttcataatcatcagaatcttgggtatgtatcactgacacagccgcttcagaaagattatgatacagaaagtacatggattgatattccggaggatgtggtgcgcgtatacagaagtctgctgttaccgaatggggcaggagaacttgtattgaataatcacttcgaaggcctgcaaaatgcgataaagaacgcggcgatgatggtgacgatgacggaacgtgatgatatcaatacaggaatgtctaataatgcgaccgtgcagggatatgtggattctggcagcggagaatcagaaggacacgaagtggtgtcattattcatttatgataagtatgaaggtggtcttggatattcagagaaaatctatgaattgatccaagaggtgatcgaccatgcgattcagatggtgaagggatgttcctgtgaggatggctgtccggcctgtgtgggagactatacattaagtaagaagatggtgttatggggacttagaagcctgaaggaaaggctggaagccccggaatatgtaaaaaagcaggtagaagaagagcgtccgggtgtccgcaaacagtattcattctttaaacttccggagaaatggaacgaattctgtgagacagtgattaagaatggagagagtggcggcgcatttctgaagaccgcaaaacgagtagaaatagagaagcataacctgatattgatcgtggacagttacttttatgaggactggctgaagataccggagaatgcgaaaagtatcaaaaacatattaaaatttcacgcagtatgtccacaggatatggagattgttgtccgtacagaagaggacatggagcgaaagaaaaagacagaaggcaagttaaaacgacgatacgaagataaattttaggtgacaggaatggattttaaggaagaatggaattggttgaattcctatcagatggaagcagtgacagatgaaaatgatgcatgtattgtaaatgccaatgtaggaagtgggaagacgaccgtactgatcgcgaaaattttatatttgcattatgaaaagaagattccgcttgagaagatggtggtgctgacatttacgaataaggcagcaggagagattattgaacgtctgaagaaaaaagaaccgggacttacggaagaacaggtgcagttttttggaacattccacagtgttgccatgcggatgctgaaaaatacactgttacaggcaaaagcagagaatggagaaatagctcatacagtggaaaatagcagcatggcaccggaagaatggacttcggagtttgaaattatagatccggacgaggaacaggaactggcgctttgtctgattgcagaatatagtctgaaagtaaagtataaaaaccgtttgaaaaaaagactggagcaggaatatccaaattataaggccggaaaagtaaccagccgctataaggatgaactgtttcggttatatcctcttttacagaaggaaaagaagaaagagaataaaatgagcttttccgatctgctggaagaggggacaagacttctgaaaatggggaaaaattctcggccagaatggattattgtggatgaagtacaggacagtgaccggtcacagctggaatttctggaagcattaaaaggatcggagacgaaaatctttgcagtaggagatccaaatcaggtgatctatagtttccgcgggacaactcagaatatgtttttcctgttaaagaacaggtttcaggcaaaagaactttcacttccggttaattaccgatcgaatgcatccattctggaggcggcaaaccgtttccttcaatttggcggaaagattcaaggcagtaatgaatgcggggagaagattcagataaggaatcattataatccgtttcaggaagcaatgtatctggcagacaagatctggacacttcatcaggaaggaaaggaatacagggatattgcagtattttacaggctgcaaaaacaggcagaaatcctggaaaagatgtttgcagaacagaatattccatatgaagtatcggtgaaaaagtcgtggaaagatattcctgtattgaactggcttatgtatgtcttaagatttgcgacgcatccggacgatatacaggcgggaatgcaggtattgatggataaaaggttcggagaaaaatgcacaaaaaagaaagcagaagacattataaagaatcacaagacagagaaatctgatatatataagaatatgatgctgttttatacagaaaaagaagtattgtcaggagaagatatatttgattcgcttggattgaaagaagcactgcaccctacctctgcagattatcagcaagatgcaaagcaagtattggattttctgaatcagatctgtacatatagcagggaaaagaagttgaatatgtcagacggaatccgggaattcctgaatggggtggcactcggaacaatagaaagtccagaggatacgcaagagtctgctgagaaggaagaagcaggcggcagagtaaaactcatgacattacatgcatcgaaggggctggaatttgatacggtattcattatcggagtaaatccgggactgctgccgatcagatgcagtagctttgaccaggaagaggaagaacggagattattctttgtaggaatcacgcgtgcaagaaatcacctggaactttcttattacacgaatccgggagaaccgggggtattgggcagttacagtaattatctgaaaatgatcccggaggaattacttgagtggaaagaaatacgcagtgatgaagaaaagcggacaaatcttaaagaactaacgagaagggcaaaagaagaaatccgaaaagcagaagcacagaaagcagaaaatgttcaggaacaaaaaacggaatccgagaaaacagaaaatgttcaggaacaaaaagcgatacatcccaaatatggaaccggtattgtgacatcggaagacgatatgatggtagaagtagaatttccaaattacggaaagaaacaatttatcaaggcatttcaggaggtcgagatgatcaggtaaccgagtacattagttagaaataaaaataaacagaagcataaaaaatccaccgtacttaataattttttaaatacgatggatttttatgatatttcatccaatggactatacctctttctttcttcgatttgtttttttatcatttttttaatgatgttaaatttacgttcctggtggtttgtcctcctttttctttattagactcttttcagtttagattgtcctctgcattggactgtacctctttctttagattttaaataaagatttaactgattggtggtccgtcctccttttcttttgttgatattataatatcgcacgaaagtgaaaatgtcaataggtaatctgaaaaaaatgtgaaaaacaataaaaagacaaaatattctgaaaataatatctgcatgattgccgggaatgatgtaactggtgtcatcatcaaaggtagaacgctcagccacgtaatgacggattttagagagatcttcatctgtaaagtaaggagcaacatgtccgcctaatataacggtatgttccagaaccatatgcaggttgttgatcagaatggacagatgtcttaaataatcctcccatctttctatacagccggtatcgccggctgattttttttcaaaaaattcttccaggttatcggaatctccgagaagcgagtttagggaacaatagcattccgcacatccctgacgtccacagtagcaatcatgacctccgggaaccagtgtcatgtgttcaaaagttccgctttttcctgtagtaccggtaagaagctgaccgtctacgatgatggcaccgcccagatggtaatttaatgaaatgtaggttacgtttttgatatccgggcttttctatcggatattcatgagcgtgatattcttgtatccacaagaatgatctgtgcgatggcgggaacagcaatcgttatgtcaattacagcaccattggtcaaattcttcggacatggcaacgaaggaagaggatatctgatcacaatgacaatttatggtattgcagcaatgtgcattttcttcctcacatttgcaatgcagccagatgtgatcgattattctgaatataagaaaaatgcaagtgtagcgggactgatcgctgcattccagggatttttcgtagtgtgctgatcgcagttctgacatatttttataaattggacagtatccgtggtgagatgacggaggaactggaaaaacgtagataaattatgcataaaaacctggacaaaaaaatcaactttttggtgaatctttatctgctgtaggtgttataatacgactgtaacaaaggaaacctacttaacaaaacctctttgtagcgttgaaaccgcaaagcgaaggctgctaagcatcagatttttggaggaaaagataaatgaatactttaaaagctgaaaaaagaagcatggacatcaaagcaaagaaattaagaagagaaggttacgttactggtaatgtcttcggaagagagatgaaagagtctgttccggttaagatggaaaaagcagctgttgaccgtttacttaaggcttgccacaaaggtagtcaggtaatgctggacatcgaaggtgagaagatgaatgttctgattaaagatgtcgagtttaacccattaaaaggtcaagtagatgagatagacttccaggcacttgtaagtaatgaaaaagtacattctgtagcagagatcgttctggtcggacatgagaaagatgcaggtggtgtactggagcagttactggaagaagtacagttcaaggcatatccgtcagcattggttgacaaggtagaagttgatgtaagtaacatgaaagtcggagattctatcaaggtaaaagatcttacactttcaagtgacaaagatgtagatgtcatgactgatcctgagactacagttgttacattgcagtatgtacacaacagtgaggcggatgatgatgccgatgaggaagccgcagaagcaacagaataaacaaaagataaaatttataaaaatacggaaaaacccggatatcgaagtatagatgtccgggtttttttgctatactacatcatatatagaactgcggatagagtagaattgcggattgtgtatagaaataagagtaagaaaacatgatgaaaatgaggtgatcttatggcaaaagagcagtttgcagtaatagagatggtaaccaatatgattctgggaaagacagaaggaatcagcaaggtggattttgtacctcagaaaacaaggtgttcggaaccggaaaatggaatgcatatgcatgataaagtaccggtaatacaggatcaggatatagaaaaaacgaaaaatcagcaacagatatttccaagaaagactccggaaagccaggggatagtctcagatcatctgagatacctgatacaggaactggcagattcaccgaatacagatatgcatcattttatggtgctgcgtcatggaaatgtgatctgtgaggcagactttgcgccgtacagaaaaggaatctggcatatcacacattcgatgtgcaaaagtatcaccggaatggcagtcggttttctggtagaagagggaaaactggaattgtcagaaaacatttataaaatattttctgataaaggaagtacctgggtgaaaatgttccggccggaggttacagtagagaatctgctgacaatgacaagcggtgtgacatttaatgaatcaggaattgtgtccggaaatgactggctggaaagttatctgaatgcttcggtggcggaaaagccagggacaaaattccagtataacagtctgaattcatatgtgctttctgcgatcataacagaacggaccggaatgccgatggatgaatatctgaagccgagactgttcgagccattggggatcacggattatctgtgggagaaatgtccgagaggaattacgaaaggcggctggggacttttcatgcatacagaggatatggcgaagcttggacagctatatctgaataatgggaaatggaatggaaaacagatcattccggaaagctgggcagaggcgtctgttacgaaaaaagtagatagtatagaaggtacttacggatacggatatcagctctggatggaagaacgtccgggaagctttgaatataatggaatgcttgggcagaatgtgctgatctatccggacgttgatatggtgatcgtaacgaatgcgggaaatgaagaactattccaggacaatgtgatgctgaatattataagaaaatatttcccggtagattggatgccaaaagagacacttccggagaatccaattgcgtatgcaaagctgcaggaactgaccgaaaggctggctggaaaaagactaaagaatgatcaatattataacagtccccttataatcggaaaaggcggttggaagaagaattcctcaaaatatagagtccgcaaaagacagaccgaaatagaaaaagtacaaaatcaacagattcatttactgacagatctgttggatggtacatgttatgagatggaacaggcaagcgtcggactttttccgctggttatgcaggtcatgcacaacaatatgacggatggtatatcgaagatcaatttctataaaaggagaacgaaagaattgcagcagactctgatcctctgctttcaggagggcgaagagtctatagaactggaaatgggttggaatcaatatatagaaaataaactgagcattcatggagaaacatatctggttgcggtgaagggagaactctcttctgatgtggatgacaatccggttctgaaagtggaaatagtgtatctggaagaagcgatgaggcggaagttatatgtgacatttgttaaggatacatcagcatcaaaattaataacaccggaatatatagaaataaaatggtacgaatcacccggtaaggctctgatcatggaaggaatggaatccatcacgacagaagttactaagcatccgatctattcccgtatcagggagaatggaggtattgatctgctccatcgcctgatggaacagacgatagagccggtgattaagggaaaattaatcgaccctgatacagaatagataagtggttatatctaaatgagattgcctgcggcgttctctgcagatattaaaataaacggaacacctgctcgacagttgcgatcatgttgttacgggcattaacaggatccatagcatctgcaagtgtgcagacaccgcgtaaaatagggaaaaatgcatcgattccctctttgttgcaggcagttgcttcttttgtgacacttcctgcaaatgcgacaactcttgcgttgtattttttcgcaagtcttgcaactccgacaggagcttttcccatagcggtttggaaatcaaggcgtccctcaccggtaacgacaacatctgcgccggaaagctcgtcttccagtccgacagcatctaagatcagttcaataccaggtgtaagtgttgcgccaacatatgcaaggaatgcaaatcccagtcctccggcggcaccggcacctggtgtattcatataatcattttcaagactttcagaggtaactctggcaaaatgtgccatcgcttcatctaatgtttttttcatatcttcggttacacctttttgcggtccataaacatatgtggaaccactttcaccacagagtggattatttacatcacatgcgacctgaatgtggcattcttttaaaagtggattcagaccggatagatcgatacaggcaactttagccagagcctgtccgccttctccggcatcttcacccttttcatccagaaaacgcacgccaagtgcttttaacattccgataccaccgtcgttggtgatacttccgccaataccgatgataaaattacggcatcctctctggattgcatcgatgatcatctcacctacgccatagctggttgccagaagaggattcttctctttatccggaaccagggtaatacctgctgcagatgccatctccataacagcagtgttggtttctctcagatatccataataagcatctactggtgtatgcattggaccggtaacggtaaggtcaatgcgttctccgttcatgccttcgatcaatgcatcggttgttccctcaccaccatctgcgagtggttttacgataacttcagcatctggttgggcggcaaggacgccttctttgattgccagtccggcttccatggaacttaggcttccttttaatgagtcaattgctacgacaactttcatgtgagtaatcctcctgaatttctgataattgtgagtttgtaagatttttcatctggttttgttgtaaaaagtataacatacaagaaaatggaaaatatatattatacaaaacaaaaaagaagaataaaaaacggaatatatgttatatgtaacatatattccgccttttaacactatagattttaaagaaaattctactttattctatattacactacttcattagaaccgtttatcataatttcaaaatgtccgtaggcgcaatgccagataaagaataacaccatctctgaaactgcgtgggttcagaccacagatcttatgaatacggtctaatttgtattgtaatgtattcttatgaagaaataaggcttcactcgttctggaaagagactgttcatgttcaaaataacaggaaagaacagagcgatccgtttcgtccaaaagggcaatggtcttttgaagaaattctgaagctgccgtttcgtttatggaaccaagaagaatctccagtgtcagctcatcaaataatgcataattacagtctggttcagacagagaatttaatgcaatccgggcagtatcataagaggatgagactttaaaaaggtcagttgtacgcccgattccaatctgaatagaatctgaaagggttcgataaaatgtctgaagctgttccagcggaaagggagcatcgataaccgcaaggtattcctgcggatactggaacatatataaccggattgaatgatctgcgaacatttgcagaatcttttcttccatagaagaaattgtaacagaagaatgcgtcgataacatccgaatgatcagaatccttttctggcttgctgtgtttatttgaaattcattcagaagatcatggatatagttcaggtctttcattttatcaggaaatgcttcggctgcatcaaaagatctggatcctgccagcagataggacagcaggtaagtgcgcttttctgataaggtacgggaggcagcacttaattcctgttcacggatgagcagtctggtgatcttttctgcaaggtaggcatatttgcggacttcatcgggagagccgctgatgccgataacagcaatcaggtagccgttgtgtgtaacaggaatatttacaccggcactggttcccttatagtgttcgctttcctgaacttcgattacagttccggtatcggctgctttttttccaatctcatgaaaagaaccgatgcgggaagtgttggtgctggcatatatcagtccgtttttattgatgaagttgatgtcatgaccacagacgtcgtggacggtgtctacgatctgtgtggcaagctgctttcctatatgtgtaatcatatctgcctcctacatcagaaatgatgaaaatgctgcttctttcgagtgtatcagatgtacccggattgctgcaacagcacttggaatatcaccggattctatgtaacggatcagttccaggtgttctcgagcagcaaccttgtggcgctcccagatattttgttctccaaggatacggattcgcatattctgatcataaatctgtgaaagattcatattcagatatttgttgcggcaggcatttgcaatggttctgtgaagcttatcatcgatcgtacagaagacaatagaatctttctgttcgtggatttcctgattcaggatagtttctgtcttcgtctctagttcatggagtttttccatatcaatgtatttgctgtaagtttcaataatatatggttccattaacattctggcttcaaatgtcatggcaatctctttcatagtgagtggaagaacgatgattcctttctttggaatgatctgaatcagctgttcctgtgcaagcatattcagtgcctcacggattggagtacggcttgcgtcgatctcttccatcagcatcatttcacttaagatatcaccaggtctgtattcgcactggataatcttctgcttgatcgtctcatatgcaatctgtttcaaattggtatctgtttttttcataatctaaagtctcctttggaggtctcttatattcatcttgcatacaagatgaatacgttttctttttaacaaacccctagtattatttaattataacaaagagccggcaaaaagaaaaataattcatgaacattttagacaaagaaaaggagttcataatgcgaaaaagatggaaaagagcaatcgcagtaatgatgtttgcggctgttatggtttccggatgtggcagcaataccgcaaagaaatccagtgcagaagaacctgtccatatcactttcggacatggacaggcagaaggacatccgtatcatattgcagcgttgcaatttaaaaaagaagtagaaaaaaagacagatcacagagttatcgttgatgttcagccaaatggtaacctgggagatgaacgagagatgacagaaggtcttcagctgggaactatagacattaccgtagcagttgcggcaacactgagtggttttgattcagacctggatgtatttaacttcccgtatctgtttgattcaagagaagaagctttcaaggtccttgacggaaagacgggacagaagatatttaagggactggaaaagcaggggatagagacttacggaacatttgacctgggattcagaagtatgacgaattcaaagcatccgatcgagacaccggaagatgcaaaaggtatccgtatgagaacactggaaagttcagtctgtgtagattcgttaagcgaacttggaatagatgcagtatcgatgagctttggagaattatttacagcattgcagaccaaagcagtagacggacaggagaatcctctctttagcatctataattccagattctatgaagtacagaaatatctgtcgcttacggaacatttttacccggtatgtccggtcatggtaagtgatctgatgtgggaaaaattaagcgatgaagatgcagtgatcgtaaaaaaagaacttcacgacatggttcagtacgaaagaaaagtatccggtgaagaattggataagaccttacagaaattaaaagatgcgggcatggaagtcaataccgtagataagagcaagttcaaagaagcaatctcaccggtatatgaaaagtacgatgcacagtacggaaaactgttaaaagagatcgaaaaagcgaaggaggaataaatgatgaagatcatacatgatattgataaagtaattaacaagatcctccggttcatcgtcatcattatgttaagcgtgatgtccgtggtggtatttgcccaggtgttattccgaatcgtacatctgtcgatcccgtggagtgaagagctttccaaatatttgttgatctggagtacattcttaggtgctgcgatctgtatccggaagggttcactggttggactggaattcttaaagaacagtatgagtgaagaaaagcagaaaatattgcagactatactgaacctgatcgtatgtgcgatgcttttattcctgatcaacgtcggattctgggcggtaaggagagtatggttccagatcacaccggtattgaagttgtcaatgggattgatgtatgcagccattccaattggttcggtattcatgctgatcaatcagatcctggtgacaatctacttatggaaaggagaggaaaacgcatgacagcattattatttatcagcatgatcgtattactgatcgtgggagttccgattgcatttgtgttatgcggatcttcgatcatagcaattctttcaacgggagatattcataacgcaatcgtgatacagcgtatgttttcgggaagcggaagctttaccttacttgcaattccattctttgtacttgcaggaagcctgatgagttcgggtggaatttcaaagagattagtaaacttgtgtaacagcctgtttggacatatttccggaggacttgccatggtagcaatcattacctgtgcattcttcgcggcgatatccggatccagtgcggcaactgcagcagcggttggaacgatcattattccggaaatgttgaagcacaaatatgataaagactttgcgggagctacggtggcatcttcggcagaattaggggttatcattcctccaagtatcggactgatccagtacggagttgcgacaggaacatcgatcagtgatctgttcatggcaggatttcttccgggtatcttcatctgtctggtattgtgtgtggttgcacatttcttatgtaagaaacagggattcgagccaagcaaaaaggcgacaagacaggaaaagatacaggctttcaaagatgcaatccttgcaatcctgatgccggtcatcattctgggaggtatctacagtggagtatttaccccgacagaggcagccgtgatcgcagtattctatggactgattgtaggagtctttgtatataaggagattaaattatcagacatcccaagaatcctcactgattcggcaattacaatgtcaacggtacttctaatcatgtctgcatcaacgatctttggatggatattgacaaagcttcagattccgcaggcagtggcaaaaggattccttggaatctcagcaagcaaatatatcttccttttactggtcaatgtattactgctgttcattggaatgttctgcgaggcaggagctgctatggtaattctggcaccgcttcttgcaccggttgcacagactcttggaatcgacctggtacattttggaatcatcatgatggccaaccttgcgatcggtatgatgacacctccggttggggtgaacctgtatgtggtatgtgatacggcaaaagtaaagatagaaggaatgttcccatatcttgtgaaatatttcctcgcactggttgcaggtgttctgatcattacatatgtaccgcagttgtctttattacttgtaaatttatttggccaataggatagatgagagagaaaaaaggaaagcgatatgaagattacagatattaaaacgatcaaacttcagtatccgtataagaaatggatcgcagatggatgtggaagctgcggtgcacgaggtgcatttctcatcctggtcgagacggatacggatttaacaggaattggtgaatccgcaacatttggcggatctatggatgcgctggaagccatcgtagaaaaacagttaaagccgctgcttctggatgaagatccaacgaggattgagttcttacaccagaagatgatgtggaataactgggcaaacggaagaaaaggcctggtgatgggtgcagtaagcggcatcgatgttgcactctgggatctgcttggaaaagcggcaaagcttccagtatgtaaactccttggacaggtgacagataaagtacagggttatgcaagtgcaggattctatgcaccgggtaagacgctggaaaatctgcaggaagaaattgaaggatatatccgccgcggctttacagcatttaagatgaagattggaagaacaagcaacaatcataagatgcgcctgcagtttatgaataacggagatttttatctcacaccggaagaagacaaggcaagaattgaactggtccgcagaacgatcggtccggataagaccttgatggtagatatgaactgtacctgggatctggacgatgtgctgaatgcaaaagaattttttgtacaaaacgacatcttcatggtagaagaaccgatccgttcggatgacaccgcaggatatatcagactgacgaaagaactgggcggcatcaaggttgccggtattgaatctgaacagggtgtatccagatttgcagaactgatcaaagcagatgcgatggatgtggtacaggcatcgcttgggtgggcaggtggttttaccggatgcagaaatattgcatcgacagcacatgcatttaacaaattatacacaccgcattcgttcttctctgcagttatgaccgccgcaaacatacagttcgcagcatcacaggttaatataccgtttattgaagcagaggaaaacgaaaatccgctccggacagagttgttaaaagaaccgatcgagacggatgaacacatgaattactacataacagataagccgggacttggaatagagcttgatctggatgtgatagaaaaatacatcataaagtaggtaactctattaatttaaaaattatatataaaaacaaagcataacaggaggattttaaaatgaaagtaggatttattggattaggaattatgggaaaaccgatggcaaagaatcttttaaaggccggacacgaagtatgtgttaatgatttccatccggaatcagttgcagaactggtagaggcaggagcaacaagtgcagcaacaaatgcagaggttgcaaaagatgtagaagtagtgatcacaatggtaccaaattcaccaaatgtaagagctgcactccttgaaaaagacggtgtcatcgacggagcatcttctgatacagtcattatcgatatgtcatcgatcgacccggtagaatctaagaagatttcggcagaactgaaagagaaaaaaggtattgagatgcttgactgcccggtatccggtggagaaccaaaggcaatcgatggaacattatctatcatgtgcggcggtaacaaagaaatatttgataaatatgtggatctcttaaaagctatgggaagttccgtagtatatgtcggagagatcggttccggtaacgtggcaaaacttgcaaaccagatggtagttgcatccaatatcggtatctgtgcagaagccatgacatttgcaaagaagatgggaacagatccggagcttgtatatcaggcaatccgcggtggacttgcaggttctacggttatggatgcaaaagtacctatgatgttagaaggtaattataaaccaggattcagaattgatcttcatattaaagatctgaataatgcattgaatgcgtcacatgcgatcaatatgccggttcctatgacggcacatatgatggaagttatgcaggaacttaagaatcacgacgaaggaagctgtgatcatgatgacattatccgttactatgagagaatgactggtgtatctgttgtgaaaggaaaataaacatgaatacagagtttataaaaggggtcatcgtgccgatcattacgacaatagatgaagatgaaaaaattgatgaagcgaagatgcgtgcccaggtcgattatgtgattgacggcggtcttcagggaatccttgcatttggctcaaatggtgaattctatcagatcgaagaagacgagatggaacggggatttcagatcattgttgatcaggcagcaggaagagttccggtttactttggaatcggtgcaatcaatacgaaaaaatgtgtccgtctggctaagatggcagtcaaaaatggtgcaaagggagtatcgattttacagccgatgttcctgaaaccaaattttaatgaattgtttttacattttaaaacaatcgcagaagcagttccggagactccggtattgttatataataatcctggaagagtcggatacaccttaggtgcagatctggtagaaaagctggcgcacgaagtggacaacatcgttggaatgaaagacacatccggtgatattacacagacggaagaattcatccgcaggaacagagatgttggattcaaggtatttggaggaaaagatacattgttatatgcgagcctctgcatcggggcagtcggcggagtatgcacagccggtaacttcatgccggagctgatcgttgatatctataataaatacgtggcaggcgacataaaaggcgcgctggaagcacagtataagttaaatccagtccgtctggctatggatgtggcaagcttcccggtagcagcaaaagatatggcagcgatgagaggtagagatgtcggcagtccgtatttaccaaatctttccacaccagaaggtgtatcttatgacaagatgaaaaaggaaatggaaaaagcaggattaatttaatatgaaacacacagtaacattaagaaatggagatcaggttccggcccttgggattggaacctggtatctcggtgaagacaggacaaaaagaaagcaggaacttgaaagtttaaaggaaggtgtccatgcaggcatgacactgattgacaccgctgaaatgtatggaagcggtaaggcagaacttcttgtaaaagaggctatgagggatattcttaaggagatgaaacgagaagagttatatctcgtctctaaggtacttccgaatcatgcaggaaaaggcagaattgagacagcattggataatacgctgatgagaatgggcgtagaacaattggacctgtatctatatcactggcgggggagttatccgctggaagagacggtcgcagagtttgaaagggtgaaaaaagccggaaagatcaaagaatggggtgtctcaaactttgatattgacgatatggaagaactctgggagactccaggtggacagaactgtctggttaatcaggtcctgtatcacactggctccagaggcattgaatatagtctgcttccgtggatgcgggaacatgaagttgcactgatgtcttactgtccgcttgcacaggcaggaacattaaaacgtgggcttatgacgcatccggtgttagtcggactggcagaaaaatataatgcaactgtagaacagatcatgcttgcatggaatatccgcgacggatatacgatcgcgattccaagaagtggaaaagcggagcatacgctgcagaatgcaggggcggatctaatcacactttcagaggaagattatcaggctatcgatagggcgtttcccaagcctgtgagaaaagaatatctggatatgcagtaaaaaatagtcgcctagtgggcggctgtttttgtgtcttatgattatccttaccaatggtgtatccgatgctgaagcaggataagccgaaattaatgatagctaaatgaccaattatagattcctgtatcttgcacagtcttcttatatagacttataataaaagaaaaagaccgaaaggactgattctatgaaacgtattttctggattgtattggacagtgccggcatcggggaagctccggatgcagataagtttggtgatgtcggaagtaatacatggaagagctgctatgacagcgggaaacttcatattccgaatatggaaaagataggaatctaccagattgatggtatggaatatgcaaaaagtacagagaatccgaccggaagttttgcaaaaatgcaggaattatcatgtggaaaggatacgacgaccggacactgggaaatggcgggtatcgtaacaccggatccgcttccgaaatttccggacggatttccgaaagtattcatagaggaattttcaaaaaggacgggaagaaagattctgtgtaatctgccgtattcggggacacaggtcattcatgattatggccgggagcaggaagagacaggagcactgatcgtgtatacatctgcggacagtgtatgccagattgcagcgcacgaggagataattccggtagagcagttatatgaatactgtaagattgccagagagatgctgactggagatctcggagtcggaagagtgatcgcaagaccattcatcggaacatggccaaattacgaacgaacgatcagacggcatgacttttcacttgcaccgccgagacagacggtgttggatgcattaaaagcagaaggaaaagatgtgatcggtgtcggaaagatctatgatatctttgaagggcagggagtgacggagacctacccgaatcagggaaatgaaaagaatatggaaaagacgatcgagatacagaagaaagagttcgacggactttgctatgtgaacttagtagatggggatatgatctatggacaccggcgtgatattgcaggatatgcaggagcactgacgagatttgatgaacagttaggagaattcctcgcaaatatgcgggacgacgatatgctgatgattacggcagaccatggctgtgatccgggatataccggaacggatcatacaagagaatatgtgccttgtcttatatacggaaaagagatcaaagcaggggtgaatctgcataccagaaaaggttttgcagatatggcggcgacgattgcggaagctcttggaagtaaataccggggagatggggagtcattctgggatgaaataagaaattgacatattcattagatgatgttagtctagttatagaaaaaggatgttgccgatagacggtcagtcctgataattaatttatgtattaaaaatagtcgcctagtttaccagacatggggcggctatttttgcgcgttttttatatcaattcgaaataatatacaataagaggtgacattatgagtcttccaccatatagaaaaatcgaccagtcaacctggtcacgtcaggatcactataagtattataccgaaaaattaaaagtaaactacagtatgacagtgcgcctggatgtaacaagattaagagcagaatgcgaccggttcggagtgcatttctatgcggcattcatctggtgtacgtcaaatgttgtgaaccgcctgccatttatgaagatgatgacggacgaagaaggcaatccgggagtgtgggatgttgtgcatccaaattatacaatcttccacaaagaagatcacacattttctgactgttggagcgaatatgatgcagactttgcgactttttataagagaatcgaaacggatatagaagctgcaaagaaagtccggggagtcaaagcaaaagccggacagccggtgaatttttactgcatctcttgtgtgccgtggctggattataccggatatgcgacatcgacagtgtcggatcatgtagcgctgtttccgattattacatttggtaaatatacagaagataacgggaaactgacacttccactgacgcttacgattgctcatgcggcaatggatgggtggcatacgtcggaattcttccgggagatgcaggaggagttagaggcatttgctatttagttcatcatcgtggcttaccccggtccatgagaaagacttggtattatgtttgttgctggatgtcacgatgcatttaaatatgaagaaaccggagtagaaggtgctgaattcgaagtatatgccaaagataccatctattcaccggacggagcaaaggacgaagaaggaaatccagttgtccgttatgagaaagatgacctggtagccaaactgactacagatgaaaatggaacagcagttatctacaatctgccactgggaacgtattatctgaaagaggttgtagcaggagagaattttgtcctaaatacagaacagaaagaatttaccctgacagcagaggatgatacacaggcagttgtttatgaaggcgttacctataaaaatgaaagacagaaagttttcgtatcagtagaaaagaaagattctgtcacaggcgaaaagctggaaggtgttatttttggactgtatgctgcagaagatattctttctaatcagggagaggttctcgtagagaaagataccttgctggaaaagaaagcaacggatgcaaagggaacacttactttcgacagtgatcttccacatggaaaatactatgtcaaagaggaagtcagaaaagctggatatcttccaaatgaagaagtatggaatgtagacgcaacctatgaaaatcagaatcttgcaaagattgaactgaacaaagaagttgagaatcagccgacagaaacacgtattaccaaaacagatgcaacaaccggaaatgagctggaaggagcaaaactgcaggtcattgataaagacggaactgttttggaagagtggatcagtacgaaggaagaacatgtcatttacggactgccggaaggaagttataccttacatgaagaactggctccttatgaagatggttatgtgtctgccagcgatgtgacgtttgaagtcaaagaagatggcagtgtgacaaaggttgagatgaaagatgaatattccaaagtggaaatttcaaaaacagacctaacaaccggaaaagaactggaaggggcaaagcttcagatcatccgcaaagacggaactgttttggaagagtggattacggatggaaagccacattccgttgcaaagctcccggtcaatgaagaacttactctgcgtgagatcacagcgccggatggttacgagattgcggaagatgttacattcacattgaaagatacaatggaagtccagaaagtagaaatgaaagatgccagaacaccggagaaaacaacagaaaaaacaaatgcaccaaaaacaggtgataaccagaaagtatgggcgtttgttctgcttgcactggcatcggccggaacagctacaggagtgactgtataccgcagaaagaagtcaaaaatgacagacaacaaagaagaaacagaagaaaaataaaataagaattacaggataaaccaatctgacagggcaggagatgtgcatagagcagcttctgccctgtttgcatataaggagaagaatgatgagacgtttttatacagcagaatcagtaacagaaggacacccagacaaagtatgcgatcagatagcagatgcaatcttagatgaatgtctgcgttatgatccatcttcgagagtggcatgtgaagtccttgccacaagaggaaatgtgtttgtagcaggagaaatcagcagcggatatgagccgccagtatttgatgtgatccgaaaggttctggaagaatgcggatattgtacagatggaatagaaatggatacgtttgtacaccagcagagtccagatattgcgaaagcagtgagtgtgtcgaaagaatttcgggataatatcggcgcaaaaataagagatagaagcaggggagctggagatcagggtgttatggtcggatatgcgtgtgatgatactccgcagcttatgccaatgccgactgttctggcacaccggatcacacgtgaactttcggcttgcagaagaagcggatatatcaaagatattttttctgatggaaaagcacaggtaaccgtagaatatgaagatggaaaaccagtgagactggaaagtgttgttgtttcctgccagcatggtgcagaaaagagcctgaagaagttagatgccgagatcagagagaaagtgcttcgctcagcactcagattactgccgccggatgaggatacgaagattctgatcaatccgtcaggaaaatttgtgtgcggaggatttgatgcagataccggactgaccggaagaaagctgatggtggacacttatggcagtatggttccgcatggtggcggtgcattttcaggaaaggactgttcgaaagtagaccgttcggcagcttatatagcaaggtatatcgccaaaaatatagtagctgctgagtttgcaagcaagtgtcaggtgtctctggcttatgcaatcggagtagcagaaccggttatgattgaggtagatacctttggtacaggaaaagtgtgtgcagatgattgtctggcggcagcaatcccactggtgtttggagtgacacccgttcagatcatggaatcccttcgactgaatcgtccgattttccggcagacggcagtttttggccattttggaagaaaggagtttccttgggagcggacagataaggtactggctcttcaggatgcaattctgtaatgccctgggtaacagaagaagagattcaggcagcaaaaaatatgactgcgtatgagtatttgcgaacacatcaggcacagagactgcaaaagacaagaaccagaaatgaatggcagttgacggaccatgacagttttaaaattaatgaactgtccagcaaatggcattggaaatccagagatatcggtggtgtgtccgcactgcggttcctgattgaagtagatggaatgaaatttacagatgccgtaaaactgttgtgcgaagagagtccgtcttttattccgacacagtctgtggaaagggaaaaactgccatttaagctgccggagaggtattgtaattgcagacgaatcagggattatttaaaccacagaggaatcagcgatgaagtgatcacgtattgtatttcgcatgaaatcctttatgaaagcgtcccgtaccataacgctgtttttgttgggaaagatgaattcggaaaagcaagatatgcattcctgcgaggaatctatgaaaaaaacgggaagggattcaagatggagcagactgggagtgaaaaaaagtacagcttttgtattccacctgaaagagaaacaaaacgagttgccgtatacgaagcgtgtattgatgcactggcccacatgacactggaagaaggaaagagggataaatatcgtctttcccttgggggaatcgctgctccgaaagaaaacgtacagatacagagtgaacgttttaaaaagccgccggatgcactggaagagtttctgaagaaccatccggaaatcaaagaaattgaaatctgcaccgataatgactttgccgggagatgggcgaaagaacagatgaaaaaacattacgagggaacgtatcagattatctgcaatctgccggaaaaagaaggggcagattatgcagaccttgcgaaagaaaaaaagcaggcaaataaatgcagggacagaccattagaaagaaggtgatagagaatggaagaaaaaggaacgatgcacgtacatctgttgacggagctgactggaaatcttttttccgaagaatccgaatgggaagaagattggtcggagagtgatgaatatggaatgccgttagatggaacagaacttgccgattatgaagatgccatccgagaagaactggaacgctatggggaagatgatctcatgcagtattttgatggaagtgagtccattcatggaaaaatacaaagtgcagttgttacgatagaaaacaaagatggaatcctgtacggctgtaccaaactggaattaaatgaatttttaagtcaggaagaactacaggaattcatcgaatacattacagggcagtacagtgacggttggggtgaaggatttgagcagagggatatcaaggtagatggtggaatgctgaatgtgcatttctggcatccagatatggagcagccgaaaatctatgaaaagaaaacagagcagatcccgataaagcctgagaaacaacgtcccaagttacaactccttgaacatgatgggaatattttttccattatgggcgatgcctcaactcttttgaaaaagaataaacagacagcagaagcaaaagaaatgtgtaaaagagtattggagagtggggactattacaaagcacttttgattatcagtgaatacgtggaaaccgagttgagtccgccaccaaaagaaaataaaaagacaaagaagaaaaatcagccggaacgctgagaaaagaaaggatgatgcctatgacaaatggcctgagtttggaagaacttatgaaagagggaacatacccagaggaatatgctgaaggggaaaactggaaaatattacatggagatacattaaaactggtcaaagcattccagccgggaatctttgatgcagtcattaccgatccaccgtatgcgtccggtggaacaaagcagaatgaaagaaatcgtactacaaaccagaaatacagcagtatgagtgctgcaaatgcacttccggattttgatggggacaataaagatcagagatcatggacacactggatggctgagtggctttacgatgtgcggaaagcctgcaagaaaggagctccgatctgtctgttcattgactggcgtcagtatccatcaattaccgatgcattgcagtgggcaggatggatttggcgaggaacagcggtgtgggataagggaaactcccgtccacagaaaggccgtttccgccagcaggccgaatacattgtgtggggcagtaatggaccgatgccaatcaaccgtccggtatcttgtctgccgggagtcttccgatatggaaatccgcagaaccggattcatgtgacagagaagccgttgcagcttatgaaagatgtcatccagatttgcgaaccgggaggtctgatcctggacccgtttgccggagcaggaacgactgtccttgcagcggttatgacaggctatcgtgcagtaggaattgaggtaacagatgcctactacaaactgggaagtgacagagtgagaattgcattagaagcagaacagaaagaggatgaaaagtagtcgggatgtccaataggacatcttgttttttatagagaaaatgagtggcatccaactggatgcagaaaggagatggagcgtatggaacaggcgctggcttatgtgtgctgttcagcagaagaaagccgggtaaaagtgcagaaatattgcagaaaaatctatgaacttgggtatgtaccaatctgtccgagatttgtattctcaccatttttggaagaatccgatgcagaagatatgcagggatatggaagaatgtcccatattcttttgcggagatgccggatggtagtcgtatgtgggaaagaagtgacaggaacaatgaataccgaaatcagtatggcagacagactccatatcatttgtacgacacttgatggactggtacagataaaagaatcaaaataaatcagaatcgagtcaatccggtgctacagaaactggcggtactcgttttgcaagcatagcgtttggatatccaaacgcactttggggagaaccccaatcccccgaatacaaaatgaacatggaaaggaaggataagctatgttaagagacggagtcatgattatgattgcattgatgtttggaggttgtttcggagtcgtggtgacttgctgtatggtgactgcgaaacggtcggatcaggagcttggcgatatgatgaaagagaaaagagaagggacggtgatgcaatgcgaaaacgaaaccatgtgatcccggtgcggttaaatgcaagggaactcagggaattggaggaacaggtggaaaaaagcggactgagccgggaagagtttatgcgttcgctgatcttaggagcacaggtacacgcaaaaccctgtgagcatcacccggaactgcttaggaagatagcgggtctgtgcaataatgcgaaccagcttgcccatgttgcgaatgcttcgggaatggcaagtgagcagagtgtgcaggaaatgctccggcttaccaaagagacatggcatttggtaaaggaagagtggtaatgacagatggcttatacaagtgttatccccgtccaccgcctggaccgttccatcgaatatgtgaaagacaaagaaaaaaccacacagaaagcagactctctggaggctgccattgattatgccatgaaccggacaaagacggaacaggcggtcttcgaagataccatcggatgtatcaatgaaaatgcgtatgcagatatggtggcaacaaaaaagagattccataagatgggcggtgtggaaggataccatctggtacagagttttgcagaaggtgaggtgacaccggaattggcacatctcatcggacaggaactagcagaccggctcttaaagggacagtatgaagtcgttatcacaacgcatctgaataccagacattatcacaatcatattgtctggaattctgtaagcatggtggacggacataagtaccatagtaatgccaagagttattatacggagatccgtaagatttccgatgacctgtgcagaaaatatggtctgtctatcattgaatccaatcagaaaaaatcaatcccttatgtacagtggaaagcagaacaggaaggaaagccgacatggagaacggcgatccgtttggatatcagggaatcggtacaggaaagctactcctggtcacaattcctaaaagagatggaaaagcggggttatacatggaaactgaacaggaaatacatttctttaaaagctccgggaatggagcggtatattcgtctgcgttcccttggaaaaaattattctgaagaggaaatacgtgggcagatactacagcccaaggtgaaacgagtctatcaaaaggcagtacagattcatcccaaaaagaaactgaccgggattcaggcactgtattattcctatttatatcaaatgggggtactgccaaaaagaccgaaaaggagtccatacgctgtcagagaggatatccggaaactggaccgcaggattgaacagattgaatttctgatgaaacatgacatcataaccagagagcagcttgccgcataccgagagccattgcaaaagcagattgcggaacttatgaaagaacgcagaagattgtatcggaatgggggcagcaagacgggggaagaacgattgtccgaaatcaatgaggaattgaagcgactccgtaaggaagttcgtatgaccgttcagattgagaaacattccttggaaatcgaagcgagacttcaggaagcagaagaacagagtcaggatgaaaaacgtgtggaagataaagaaagaatgcagaaaagtcaggaggtgagataagtatgaattacggagcagaaccggcagatcaggtggtacggtacagtctggaagggatggagtattcgctgaagatcaccgggaatgtagcaaagcatgtggcagtctttattgctgccgctttgaaggaccagaaaaagacaagagggaaaacaagacttaccagaatgttaaaggaacagcgcccgatgaaattttttactgttccgggtgaccgtctgaaagaatttgcaaaagaggcaaaggcgagaggtatcttatatgtagtcatcaaagataaggtgaatccggaccagacagaggtcatggtatttgcagatgatgcagcgaagatgaaccgggtattagaccggatgaatctggattttgtaaaagcggaatcaggctctatggttacagaagcagtggaaaaagagactgcaccggaaaaggcagaaaaccagatggaaaaagaatcaagggagaatgtacggacagagaccgttgtcctgccggaaggcaagatagaatttgaactggtcgatgcggaagaaatgttccagatcggggatgaggctttcccagaaggaaattttacacaggcgcaggagggggaagaaaagaatccatccgaacctttctcgcgcaacagaaatacttcttccgatcgggaaactagctggaaagaaaagaataaaaaaccatctgtgcggaaagaacttggagatatccgcaaggaacaggaagagaaacgtaagaggccggacagacggaaaaatgccagagagagcaggaagaaacgcaagaatatgaaaacgaaaggcaggtaatgtatatggatttaacagatatgatttcaggtggaacggaagaacagccgattcctgaacagaaattgactaaggaagaatatgcagccaagaagcagcaggaaagagaagaagtatgggctgaagtagattcacaggcacagggagtttttcaggatggagaaaagctgaaaggttttctggactttatggcagagtgtaatacacagagaacaccgaatctgcttttgatttacggacagcatccagattttaaggtagtaaggtcttatgaacgctggagagaagaacaccgttcagtaaaagcaggggagcatggcattacttatatgatttccactgaatacgaaaaagacggagaaatgcggagagggtatacgattggaaaaggatttgacatcagtcagatgtctggaaagccattggaagaacgccctcagcgaagtctgacagaactgataggaactgtcttaaaagaccagtcggtacgtgtgcagattgaggatgatctgccagacaaagtgcaggcccagtacaatccgagataccgtaccatttatatccgcaacggaatgagtgaagtaacgacattccatgcactgaacagagaactggcgtgtgcagcactggaccagcataccggaacctacagccgacagaaagtcagtgcacaggcttattgtgcagcctatgtgattgcgaaacgttatggtgtggatgttaccggattcaatctggagtatattgcacagagaaatgaatgtggaaagaaagatccacaggaactgagagactttttaaatgatgtccgtcaggcttcctatagtatccgaaaccatatcgaacggaattttggtgcaaaggaacaggagtatgtaaccgatgagttcgcaatcggagaccctgtaaaaacaccggaaaccaaggatgaaaaagcatctggaaaagagaaaaaagcaaagaaccagccggaacgataaaagtgaaaaagttggacggttggagtagctattacggaggtcttgtgatatggttggtgtaacaaaaaaggaggtcagccagatgacaaaatactatttgaagatggataacattatgaaaaatatgttcgtggtggcactgaatgatgagctacaggcgcagagtgagcaggatgaatgtttggaagaaacgaaagctcttctgaaaaaagtaagtgaatacgacctcgcccagaaacgactgcagattacagccggggaacaaaggcagatccgtaaggcactgaacagactcagaagtaaatatcttgcagccggaagatacagtgatggaatagataaagttattattcaggttgcaaaaccgaatactagtagacatatgttctggtagagaaaggagtggttgattggtcatttattcaagagaaaaagtggcaagacttagagaacagtatccggcaggaacaagaatctgtctgaattcgatggacggagaagcgggtatgccgcagggactggaaggaactgtgcagtatgtggatgatgcaggccagctcggtgttaagtgggacaacggcagaagtctctcactgataccgggggtggattcctttcataagaaagaaggacagggacatccagaagaaaagccacgcaagaaaagagaatctgacttgcagagataagtacaaaaaagcaggactgggttctgtatcttgtctttctgccatttgtctggtgggcggcagcgattaccgcttgtgccattacaccggataagaattttattcaaatcttagaaacgctgagcgaaaaactcgaacagccgttttttatcacgtatacaccgtatacgttcaaatgtattctgatattcacagcagcctatttcttaggcattggtatttatgaatcccaaaaaagaaattatagaagaggcgtggaacatggttccgcaaaatggggcaacgtgtccgaaatctgcagacgttactgcgaaaagcagtacacgaataatctgcttctgacacagcatttccgcatgggactggatggatataagcataaacgaaatttaaatgtgctggtagtcggaggttccggggcaggaaagagccggacctatgcgattccgaacatcatgcagtgcaactgctcgatggtgatcacagatccgaaagcagaacttctgcgcaaaacaggaggtgttctggaacggaatggatatgaagtccgggtttttgatttgatcaatccggagacttcctggtgttataacccgtttgcgtatgtccgggatgataaggatgtactgaagctgatcaataacctgatccgcaacacaacaccgaagggagcgcagagctcagacccgttttgggagaagtccgagactgcacttttacaggcacttatgctgtatttgctgcatgaagctccaccagaagaacagaacttcccgatgatcatggaaatgcttggaagcgcacaggtcaaagaagatgatgaggattaccagtcaccattggacattttgtttgaaagactggaaatgcgggacccagagagtattgcggtcaagcagtatgccatttataagcaggcggctggtaagactgcgaagtcgattttgatatcggttggtgtccgtctggcagctttcaacctgaaacagatcgccaatctgacctgtacggacgaactggatttatacagtatcggggagaaaaaagtagcactgttttgctgtattccagatgcggacaccagtatgaattatctggtcggcatgatttacagcaatctgtttcagacactgtattatgtggcagaccggaagtacggaggaaggcttccgattccggtacactgcattatggatgaatggccaaacgtagcattgccggatgactttgacaagattctggcaaccatgcgttccagagggatttcctgcagtatcatcatccagaacattgcacagatgaaagctttgtttaaagattcgtatgagagccttatcggtaactgcgatgaatttttatatctgggtggaaatgaaaaagaaggacataagtatgtctcggaattattgggaaaagagacattggataccaatacctacggacagacaaaagggcgtagcggcagctattcggtgaattatcagcagactggaagggaacttttaacaccggatgaaatacggcttttagataaccgcaaagcgattttgtttattcgtggggagcgtccgatcatggacgataaatatgatttaaaaaagcatgtgaatttcagatacacagaggacggtggtgcatcgccttatgattatgcgaaaacaccactggctcacgacgacctaaagattgacattaacagattagacgactacgaactgctgtctaccgaggacattcttggtgaatagcagttttttgatggattggagtgatgtgtattgaagaaacttctcacaggagaaaaaaatagaataaaaaagaatacaacgaaaaaaatgacaaccccgatgccgatggggagaaagcagaagaaatggatggggctttatatgacactggttcttattgcaaccgtaggggcaaccacggtgtttgcagccggagatccgctgtcggtaatcaataacctgtctacattcatcttctcgctgattcgtgccatcggcttgatcctgcttggatttggagtggtgcaggtaggactgtccttgaaaagccatgatccaagccagagggcaaatggatttctgacactggccggaggcgtgattattacgttcgccaaagaaatcctggatctgatcatggcgtaagcctctgaaaaaagatagaaggaaaccgcaggagtgccgaaaggcgctcctgtattcaaaaccattttctaggaggtgagaatttttgagtgataactggattgtacagaatctaaactcggcactatccacatggagtgaaaagatggcagaactgtggactctgctgactgaaaatccggcaacttttaagggtggcggcatctggcggattatgaccaatatcaatgatacactgacagccattgcctatggattactggtgttattttttgcagccggaatcataaaaacgtgtggcagttttacagatctgaaaaagccggaacatgtgctaaaagcatttatccggtttgctcttgctcagggagcaatcacatacggaatggaacttatgcaggcactgttttccatcgtgcagggaatcgtgacaaccgtaatgagcggctccagtatggcaggaagcgtgacggaactgccaacggagattgtagataagattgagagcgtgggaatgctggaatccattccgttgtggattgtcacactgcttggcagtctgctgattactgtattgtcatttgtgatgattctgacagtgtatggcagaatgttcaaaatctatatgtatacggcaattgccccgattccgatttcctcgtttgcaggagaacccacgcagtccatcggaaagaattttatccgttcatatataggcgtatgtctggaaggggcaattattgcactggcgtgtattatcttttctgcttatgcggcaagccctccggctgtcggagatacagagctgagtgcagttacaatcgtgtggaattatgtgggagaactggtatttaatttactggtgttggttggagcaattaaggcatctgaccgtattgtcagagaaatgatgggacttggaggttaaaaatatggatacaaagaaaacattaagatataactgggaattcggacgtgagacagtagcgatacgagtgagctcttatcggaacaatgggaatttatatgtaggactctgccataaggaagggagagaatgggaagattttggagatgtaaccattaatctgccctatcagttcttagagccaaatgaggcttttataacaggagattttaccaaggatatgcttcattttatcaaggaacataaacttggaaaagtgttgaatgaaacaggaagatcaggatatgcaacctatcagaaggtagcgtttgatctagcaagacttgcggaatttgatccggaaggagttgcagaacactgtagacttgccgggatagaagtaccgaaagaaaaaccacagaaaacgaagaaacaaaacaggggagaggaacgataatttatggaagtaaagatgaacaaagaaatcagggactatcaggaatccatgtttatgggactggacctgagacaatgtgtgtgttctgttcttgcgattcttacagcaatcggaatttactttggaatgcgtgatattaccggacaggaaataaccggatggctgtgtgtgcttggtgctgctccatttgctgcctgtggctttttcaaatatcatggtatgacagccgaacaatttttatgggcagtgatcaaatccgaattgctgtatccgaagaaactggtgtttcagtcggaagatatccactactcctgcatgcaggagaccatctcgctgggagaaaagaatcaaaaggatggagcggaaatcataaaagagcgggagcaaagagcagaagcaaaacagagaaagaaacgcaagggaaggagtgatgcctttgattaaaaccttaagtcaggcacttcggatggataaggaacgcttcaaagttccgaaatcagtccaacaggcaattcccatccagcgaatctggccggatggaatttttcaacagggaacgaaattctcaaaaacatatcgttttacagatatcaactattatattgcgagtaaggacaataagacagaaatgtttctggattattctgaactcttaaattcactggattccggcatttctgccaaaattaccatcaataaccggagaatcaataaagaagaattcgaaaagtctattctgcttccaatgaaggaagatggactggaccactatcgggaagaatacaacgaaatgctcctgtctaagattacaggaacaaacaacagcatctatcaggaacggtatctgaccgtcagtgtacataaaagatcgattgatgatgcaagaacctattttgcacgtatcggaacagacatcgtaacacatctggcaaagttatcgtccacagcagaaggactggacgcagagagccggctccagattttcagggatttcttcaagggagatgtcccacaggcattcccatttgatctgaaacaatttgccaagaagggaacaagtttcaaggactggatgtgtccggattctatggaatttgaacgtgaccattttaaaatcggtgacaggtacggaagagtcctgtatatgcaggattatgcaagttatgttaaagatgacatgatttcagaactgtgtgacttcagccggaatctgatgttgtcgattgatatcctgccagtccctacggatgaagcggtaagggaaatccagaaccgactgcttggtgtggaaactaacgtgaccaactggcagagaaggcagaacgctaataataacttctcggcaatcgtaccatacgatatggaacttcagagaaaagaaaccaaggaaatgctcgatgatctgacaaccagagaccagcgtatgatgtttggaattttgacaatggtacatctggcagacagtaaaaaacagttggattccgatacggaattattattgtcgatagcaagaaagcatctgtgccagatggcaacattaaagtggcagcaagtggacggactcaatacagtgcttccttacggactgcgaaagctcaatgcgctgcgtacactgacaacggaatcaacggctgttttaatcccgttccatacacaggaaatcctgcagccgggaggtatctattatgggcagaatgcagtcagcaagaaccttctggtagccgaccggaagaaactgatgaatggaaacagtttccggttgggcgtcagtggatcaggaaagagcttttcggcaaaagaagagattgtgcatctggcattgagtaccgatgacgatatcctgattcttgatccggagtccgaattcacaaaattagtagaggctcttggtggacaggttgtaaaagtatctgcgacatcagacaatcacctgaatgcaatggatatggacgcagcctacggcaatgaaaagaatccattgattgaaaaatcggagtttatcctgtctgtgttcgaacagttggttggagcaggaaatctgtcagcaaaagaaaagtcaatcctggatcgctgtgctgcagatgtgtaccgggattatatccgaagtggttataccggagaagttccgacattgaaagatatgtaccgacagctgatgttacagccggaagaagaggcaagaggactggcattatcatccgaactttttatcaatggaagcctgaacacctttgcacagccgaccaatgtgaataagaagaacaggatcatggattatgatatccgggaactgggggaacagcttatgccactgggaatgctggttaccttagacagtattttcaacagggtaattcagaattggaaagaaggaaaaacgacatggatatttgccgatgagttctatctgttattccgctatgaatacagtgcaaatttcttctaccgactgtacaagagaatcagaaaatacaatggattcgtgacaggtttaacccaaaatgttgaggaacttctgaaatcggacactgcaagactgatgttggcaaacagtgagtttttgattcttttgaatcaggcaagtacagacagggaagaactggcagctcttttgaatatttccgaaaaccaactgtcctatattacaaatgtatcggttggtagtggtctgatccgttgctctggaaatatcgtaccatttgagaatacgttcccaaagaatacagacctttataaactaatgacaacaaaaccgggagaatcataatgaagaaaaaagaagaagtaacgataactttttatgctgcagagtgcggtgagtttcatgatttaggagaatatacaaaatgcagaacgctggaagaggcatataaaaagtaccagaagtattgtagaacatctgccaatatgtgtccggctattgaattttctatccatgatccggactctatttattcggatgtggaatatcgattgccgttatcatctaaagataggggggatttggaacttgtgccatattacaacgaacatccactggtaaatgaggcaatcagacagttggagcagttgcagaaacagcaggaaaaaaagaaacatcgggatgttgcccgatgagataagagatacggaaagagggtgaccggatgagagatatcaaggaacgggtaagggataagaatccgaagattcgaaatccggctgcccggcttccgaaagagctggttcgccagacggtactgaaagcaaaagaaaagccaagggaactacatgagaaaagcagtgggcagtcagactccccaacacaatatggaactgaaaaaatagaatctgtacagtacagggcggcgagtgtggcaggaaaaaccataggaaaaaccacatatcgaggtggaaaaaaacttgccggagtgacctacaggaagataaaggaaagaaaaagcagacaggaagaagcaatggtgcagggggcagaaagcggaaatcacggactccggttccgtccggtgtgtcatagtcatctccgaatacgccgagtttttcaagctttcctactgccacctgtgaaatatatggcaccaggttgttcgggattcccttcggatcctctccgatacgtccactttcatgtgctcctaccgggttgaaatagcgaagaagaataacattcatatctggattggccttctgtacatccgtcatgatctgttccatcatggattttgtccatccgtaaggattcgtgcactgtcccttcgggcactcctctgtgatcggcatctcctccggacttccgtatacagttgcagatgaactgaatacgatattcttaacacctgtctgtttcataacatccataagtgtcaaggttcctgttatattattacggtaatactctaatggcttctgtacagattctccgactgccttcaatgctgcacagtgaatcaccgcatctacaccctctttttccatcattgccttcaatgcagtttcatccattacatctccttcataaaatgtaatgtgctttccagaaagctcttctactctctttaaagattcttttgatgaattgcacagattgtcatatacaacaacttcatatccttcattcaaaagttccagtgctgtgtgacttccgatataaccggcgcctccggtgattaatattttctttgtcattacgatacctcctatttttacctttactgcatatatcattataagaatctgtaattttcctgtacatacaaaaaactctacaaaatatacacttttttcttctggacatatcgtattttaattatatctatttttccttttccagaatcctttgcatcttccctttgatcctctgaagtgcattatcaatcgtcttcggactccggtccagaagctttgcaattgtcttataatcggtccccatcaggtgtaaatacaagactctgcgttccagttcacttaaatccttttccagccgttcttccagcgactttgcatgttcctgactgacaagcagttcttccggatttgtctcatgttctgattccatcatatcgatcagagaaccttcgccatcttccctttcatacaaagaaatgtaactgttaagcgggctgtgtttctttctgttcgaagcttcgattgccgaatagagctgtctcgtcacacacagtcttgcaaaactgaagaaagaagcttcctgatccacatcataatcctgaacagctttgaaaagaccgatcattccttcctggatcaggtcgtctgtctctccgccgagcagatacattgcattggcttcttttctgaccagattcttatatttttccatcagataatctataatcccggtttctcccatgcggagtctgcggatcagttcttcgtctgttaattttttatactctgtcatactttcctccgaagtccacatttcactctatacttatctgcttatggcaattgcctgtacttcattttcttactgcatccgctgtcttacgatctcatatgccagcacacctgctgctaccgatgcatttagggaatcgatgtcccctttcatcgggattctggcggtaaaatcgcaagtgtctttgaccagacgtcccacgccttcgccttcattaccgatcaccagaccgatcggccccttcatattgacatcatacatgacatcgccgtccatatcggcacacacgaaccacagacccttcttcttcagatcttccatcgtctttaccagattcgttacttttgcaaccggcgtataattcagcgcacctgcggaagttcttgccacagttgccgtcagtccgactgcacgtctcttcggaatgatcacgccatgtgcacctgcctgatttgcggtacggatgatcgcaccaagattgtgcggatcttcgatattatccaaaatgatcaggaacggatcttcccctttttcttctgcaagctttaacatatcttctacttctgcatactcatatgcggcaacacttgcgatcacaccctggtgttttccggtctctgacaactggtttaagcggtccttttccacgaagttcaggatcgtgtcatgctttcttgcctcacggatgatggatctgactgcgccgtcctgacatccgtccagtacatacagcttgtctaccggttttccggaacgaaatgcttccatgacggcatttcttccttctatgatattttcattttctttcttatcatacgattttttatcgtgcatcttcttatcatgtacattcttatcgtgactcatattcgacactccttattgttctttgatactgtccagacctattttaaccagttccagcattcttttccactcttttttcagatacagataaccaagcagggcttcgaatcccgtcgcacgtctgtaatctgtgatcgactggttcttcgccggcgatacactcttggcattgcggcctcttttatagattgcatgctcttcttctgtcagatgttcctgcattgtacgcatcattttcgactgtgcggatgcctgtacataagagctggtcttctggtgcagtttctgtacctgacggtttccttcattgatcaccagcgttttgatgatcagatcataaatgcagtctccgatatatgccaaagtaagaggtgaatattctttgatatccacctctttcatccggaaaatctcctgcatataagtgtcaaattcccactctacgctcttttccattgtactccttctctggtatcctttaagatgatacccttctctaacagttcatcacggattgcatcggctcttgcaaagtctttagccttacgtgctgcctgacgctcctcgatcagtttctcgatgtcttcgtccagaatctcttctttcttatctacgatcagtcccagaactcctgttaacttcacaagcagatcgaataatttctgaagatattctttggaactttctgcatcggttgttgtattgatatattttacaaggtcaaagattgctgcaacggcatctgctgtattgaagtcatcgtccattgccttttcaaatcctgcaacaaactcttctgtttttgcaaagttttctgcttctgcatctgtgattgcttctgcttttgcatttcccataaggaacttcagattatctgctgcatttacgatacgctccagaccattcttggatgcttccatcagatctgcactgaaattcagtgggcttctgtaatgtgcactcagcatgaagaaacgaagtacctgcagatcgtactgttcgctgatctcacgtacggtacggaagtttccgagagatttactcatctttctgttatcaatgttcaggaatgcattgtgcatccagtatcttgcaaattctttgccattggcagcttcgctctgtgcgatctcattttcatgatgtgggaatacaagatcctcgccgccggcatgaatgtcgatctgctcgcctaagtatttcttagacatctctgagcactcgatgtgccatcccggacgtccctcgctccatggagactcccatgctggctctccttcttttttcggtttccagagcacgaaatccagtggatcttctttttcatcttctcctgataccagaagggaacgctcaccggaacgcagatcatccagattcttgtgtgaaagtttaccgtaatctttgaactttcttgtactgtaatatacggtaccgttcttctcgtaagcaaatcctttgtcaatcagtgtctggatcatatctaccataccacagatttcttcggttgccagagggttcttggttgccggcttgatgttcataccatccatatcttttttgcactctgcaatgtaacgtttggaaatctcgtcggctgttacgccttcttcaatggctttcttgataatcttgtcatctacatccgtaaagtttgatacgtaatttacatcatatcctttatattcaaaatatcttcttacggtgtcgaatacgatcatcggtcttgcattaccgatgtggatgaaattgtatacggtaggtccgcatacatacatctttacctttccttcttccaaaggtacaaattcttcttttttctttgtcattgtattaaatatcttcattttctgatatttcctcctttttttcttccggtatcggattctcttttaagcactgcatacatttttccatctcctggatctgtctgtgcattcttaaattatcttcctgcagggctctgatatcattttcaattggatccggcagatgtacctgatccatgtcgagtctcggtatcttctcatcattcattttaacaactctgcccggcacacctacgaccgtacagttcggcggtacctcttttaatacgacagatcctgccccgatcttggaattttctccaatggtaaaagaaccaagtacttttgcccctgcgctgaccatgacattatcttctaacgtcggatgtctctttccctgttcctttccggttcctccaagtgtgactccctggtacagcgtgatattatctccaagttctgcggtctcaccaatgatcactccgcttccgtggtcgatgaataatccttttcctatcgtcgctcccggatggatttcaatcccggtctttcttgctgcccgttgcgatacccatcttgcaaggaaataatgtttcttcagatagagcttatgtgcgattctgtaatgaagaatcgctttaaagctggaatacaggaacacttccatatttgacttaattgcgggatcccgctcccgtattacctggatttcttcattgacatatgatatgatgcccatctatgatctctcctttttataagtttaccgcccaacctgcatgctttaacatacaagaaacaaaaaaacttcgtctcttgctttacacaagagacgaagtatatccgcggttccactctttttaaagaatacagttatattacccgtatccttccctcagtacacgtaacgtgtgtaatcccggatccggctatgacacttttcatctttttcaccggaccgactcccggacgcacttcacaaaagctgtaatccaaaactgctttcagccggtgacagtttctctctttcgacacatcgcatctgctactctttccgttcaaagtctttctcatatagaatatatattatgcgatatcatcctttttgtcaaccagtttccagcgaatctccgctttaaaaagatccgcctccgtctcaatccagaattttcctttctgaatctccacgaaacttttgacgattgcaagtccaagtccagatccttcagtatttcttgacgaatcccctctgacaaaacgttccgtgatctcctctgggttaaatgtaagctcgtttgctgatacatttttcatctggaacaccgcatccccgtcttctgccgcaattttcacatataccctcgtatgaggcattgcgtattttgctgcatttccaatcagattttcaaagatcctgtatgtcttctgtccgtccagtgccacgatcactttatcctccggaatatccagccggaagtccagattcgcttccgtgatcttttcttccatttccagcttcacctgtttgaacagattcacaatgtcaatgttggcaatgttcagattcacggatttgctgcttgctttactgatctcaaacaaatcttcgatcaatgctttcagtctgagagactttctatccagcacatcgatatattctttctgtctctccggatcctgttcaatcttcagaagattcacataggtgatgatcgccgtcagcggcgtcttaaggtcatgcgagacattcgttaccagttcagtcttcatacgctggctttttacttcctcatctaccgccttcttgaatccgctctggatcttctcgatttcttctttaaacggctcgaatacacccagattctcatcgatttctacatccagattgccatctgcaatctcatttgtcgcttccagaagtctgtgataattccgtttcacctcattaaaatatttttttaaaacaaagtacaggattgcagaataaatgatcagtgccataattccatatacccagacactcgtcacagcaaggatgataaagttcaccagtacgatccgcaggattgccttacttcctttatcggtaaaatcaatgtctgtaacaatctcatatactctgttggccagttttttcaccttccggtacagtctcccaccgtcccgtccgactctttctgcagccgccggagcttcttccctcagcgccttccacatccgccataccagcgtccgttccgtgacatactttctgagcccaatcttctgaaccgcactgatacacgttgtcacccagtatgtgaccgcaaatacaccgacccagattgcaaaatccattggctgcggcaagccttcttctctggttatgatccagttcagtttatcatccagaatcccaagagtaattgacgcaacaacaaaaacaacctcgaatggctgccggaagatctttccgccaccaattttcagtgtctcgctctgtgcaaaaatccatgccgccacacatactgctgccatgcaggcaagcatcatataccatgcatcattcggagcttcatccccgaaccagtaccattgattcagatattgttcaatgctgcttttcttcattccgtagatgtatgtgcggtttttcggcgtcttcagttctccatacgtagcgtcctcaaccgtctcgctccagttgtcaatgatctttctgagaacaatactctgcgctgtcttttcgccgctctttacaactttcacatccgggttgccatgctcatcgtaagtcagcaccataccaaatgcatattctttaaagctgtcatctgtcagaccatttccggtattcgccgtacttcgtcccagaaccgttcccgatccatcctcgatccggtaatccagataaggatataatgcttcataatcctccatccacacatctgccacatcattgatctcatcctgtgacatcttggcttctcctgtcttggatgatatctcctgattataaaggatataactgaattccagaaagctttccagatattccctgtccgaaagcgacgtcgtataagtcttctgtgcttcctcgaccgctttttcataaatcacatcataattatacagcatgacatatgctgcacttaatattgttacaattatcagaaaaattcccagtttacgcctgcttttcaattttgtatccaacgccccacaccacctttaagtattttggttctcttggatttacttctatcttttcacggatatttctgacgtgtaccataatcgtatcggtgttgatcgcacgttcattccatacccgctcatagatctcctccgcagagaacacccttcccggattcttcatcagaagcagcaggatcttgtactcgatcggagtcatctttaccggttcgccgtcaacggtcacttctacattatcctcattgatctccagtcccccgatcgtatggattctggaattttcttctttatctcccagcttttccataaaacggcggtatctgcgaagctgtgagttgactctggcgagcagttccatcggggtaaatggtttcgttacgtaatcatcggctcccatattcagtcccatgatcttatccacttcttctgattttgcggaaagaaagatcaccgggaaatcatatttttccctgagctttaccaccatagagattccgtccatcctcggcatcatgatgtccacaattgccagatggatgtcttctttttcaatgacttccagtccttctacaccgtcagctgcctggaatacttcatacccctgacttttcagatatatctctacaccttctctgatctccttgtcgtcttctacaaccagtacatgattcatctccatcttatttctcatcctttttcctaattccagctgtttcctctgttgttattatattacccggcatttcttaagggtgacttcagaaaattctaaagaaaaacgaaagacacttccttttttacactgtctcgttcagataaacccttgacaatggtatgatcttaccaagttcttctttcatacgttccgacatgactgcatctccatccgcacagatttcttctgcagtctttacaccgaatacaaggcttgcaagtgctcctactgtgatcgttccttcactgttctccggctttccatccatcagcatcacacccgagaattctgttcccgtgatcatcacacaacgattgttctcttcgataattggatccgttacagtaaagcatgtacccataaatgattgcaggcgcaatgacatcagcattcttctgacatctacgatacggatcatgatctttggtttgccgccgtctacctcttccgcttctgccgcgatcttgatatctgtaattttaccgtcttttttgtaaatctttaatattccgccatcacttgcatattccttgatcaggcgttcataatacgctgtgcttcgttttgcataaacctgatatgactgtgtcagttgtgcttccatataagccgccatctcttctgcatccgcattcactgcatccgttatgaccacgccttcttctgtttcctcctccggatcataatatgaccggttctgttcacataccgttcggaaatcaaagggcagataaatgctctctgatgcaggcatcaggaatgtaaacgtctctccgtctgcgtacatatcattcaatgcctgtttcaacaatcctgccatatatccacgtttcctgtaagattctctcgttgcaacggcgacgatataattcacatcttttttactgccgttcaccgcgagttcatatggattcagatgcagcatggcctgtatttctccgtcctcttctactgcataaatctgattgtcttttagtttttcttcataataataatcaacaaaacttttgctgtcttctgaaaacacttcttcatacagctttttcgtgttctgtttttcttctgtttccagctttcttatcttcattttgtttttccctttttctcttatttttctatctgcttctgtgcatttgctgtttatacgcctgcttttatcatttttgcgttatctaactttcctgcactttcatacatccgccacagccggcacatccaccttctgaaggtccgactctgtaactgtaattagcgatcgtatccagacttgcaattgcctgtgaagaaattccttctcccgttccagtaaaaccaagtccttcttctgtcgttgccttgatattcacctgatccacctcgatatgcagtgcctctgccacatttttccgcatctgttcaatgtgcggcgccatcttcggccgctgtgcaatgatcgttgcatcgatattgccgatcacatataatttctcgtcgatcattcttcccacttcttccaaaagcctgatactggacgcacctttgtacgccggatctgtatccggaaaatgctttcctatatcaccaagcgctgcagcccccaaaagcgcatccatgattgcatgtaataatacatctgcatccgaatgaccaagaagtcccttctcgtaagggatcttcaccccaccaaggatcagatctcttccttctactaacttgtgtacatcatatcccatacctacgcgcatatattctcctccttatttttgtttatctttttgttaatcttttatctcactggtttgtcattttctggcgtagcgctttcttctgtttcttccaccggttcttctgattcattttcttctgttgcttttacttcttccgtctcattctcagattcattcatacggcccctaatgctgtcgtcccggtattcctttttcaccatcttgattccggatcctaccagccagtaaagaccaatcaatgcgaatattacgcctgccgctatataaagtatataattctccggtctatccgcaagtgaactgttgatcagctttcctcctaaatatattacatatgcacccgcaacaatgcgaatgaataaactactctttggtaccatcttcgttaacctcctgttcttaccatatctgtagaatccgccaaagcatccgcaatgaactggcagtgacagttcctgcaggcagcagtttctttcgaacgcatggcgatgtaaaatattataaacgattttacttttcttgtatactttgttaggtaaattgggcataaaaaaagaaccggattcttttccgactctcttgctgtgtataccaatatacttagaacctgccacctccgaaagctgccactggcaacttttacagatgtatggcaataaaaaatagcgggaactggatttgaaccagcgacaccacgggtatgaaccgtgtgctctagccaactgagctatcccgccataatgagtagcgggaactggatttgaaccagcgacaccacgggtatgaaccgtgtgctctagccaactgagctatcccgccacaatcaatttagaaaatgtatgggaccaatagggctcgaacctatgaccctctgcttgtaaggcagatgctctcccagctgagctatgatcccatatattttgtcgtctctctcgaaccgacttcgttagtatagcattggtttcgtggaaagtcaacaccttttttcaaattttttaaataatttctacaattgatatttaatttattaactgggttgacctctcggtccttgaaggacgcagtataaggcacttaattcttcaggcatccgatacccacggaataaaagtcgggtatcctttccagtgaatgtggagaaggtgttggtaatacttaaggggcaaaattctgcgttaggtattcaaaatttgactgtttgaggcgtatgccgagtttcaaattttgaatgcctgcttttagcagaattttgcccctttagtattacccgccgacggaacctgaacaggaaaggattactaacttttattccggtccgagtagccgtcgcctgataaattaaatactaattctatacgattccctgagctgtcatagcatctacaactttttcaaatcctgcaatgttagctccggcaacatagttaccttccattccgtaacgttttgcagcatcgtccatgttgtggcagatgtttaccatgatgttcttcagttttgcatctacttcttcgaatgtccagctaagtctctcgctgttctgtgacatttcaagtgcagatgtagcaacaccaccagcgtttgcagctttaccaggtgcaaagatcacgccattctcctgcagatactgtgttgcttctaatgtagtaggcatgttagcgccttcgcatacagctacacatccgttagcaactaactgttttgcatcttcaaggtgaagttcgttctgtgtagcacatggaagagcaaggtcaaccttaacagaccatacaccgcgtccttcatgatattctgaattaggacggtagttcttgtactctgtcagtcttgcacgttttacttctttgatttcttttaatgctgcaacgtcgattccatccggatcatatacccatcctgtagaatcacttgctgttacaactttagctccaagctgctgagctttctggattgcatagattgcaacgttaccagctccggaaactgcaactgtcattcccttgatgtcttttccgttgatctttaataattcttctgtgaagtagagaagtccatatcctgtagcttctgttcttgctaaagatccgccgtagcttaatccttttcctgtcagaacaccttcatacaggcctctgattctcttgtactgaccgaacatgtaaccaatctctcttgcacctgttccgatgtctcctgcaggaacatctgtgtcagctccgatatatttgcaaagttctgtcataaagctctggcagaatgccattacttctctgtctgattttcccttaggatcgaagtcagaaccacctttacctccgccgattggaagtcctgtcagtgagttcttgaagatctgctcaaatccaaggaatttgatgataccaaggtttacagatgggtgcagacgtaatcctcctttgtatggtccgattgcgctgttaaactgtacacggtatcctgtattaacctgaacctgtcctttatcgtctacccatggaacacggaatttgatctgtctttcaggttcaacaagtctttcaagaagagcgtcttttctgaatttctcctcgttagcctccacaacaactcttaatgactctaatacctcttttactgcctggtggaattctggctctgcaggattcttagctactactttctccagtacttcatcaacatatgacatagctttctacctcctaaaataatatacgtatccttttcaaaagcgtccctgtccaacaatttgtccaaatgctgcgatccagccgccggctgttttttctacacgctttggaataaaaaagcagatgacttacgccatctgtttttccctgacgcctttgtcctttactattgtaaagcaaacaagtgtatctggcaagatattttttacagtttttattattttttgcaactttttacaaaacccttgcagattttgcaagggttttgtgctttttctcatgttttattcatttttatgaaacagattgtgctctaaattgcatttgttataacacaaggatgccaatttccatctcattaccggaagtctcagacacctgaacattcattatttgaagtattttactcctgattcgaagatcttcatatcctgttctccgtaaatgttcattgccacacttctgtttcttctttctgaatgcgccatcttaccaagtacacgtccgtccgggcttgtaataccttcgatcgcacagtaagaaccgttgacattccattcttcgttcattgtgatatttccttccggatcacagtactgtgttgcaacctggccatttgcgaataacttgtccagccattctttatttgcaacaaatcttccttcaccatgagatgcagggttggtgtatactccgccaagttctgcttctctgagccatggagatttgttcgttactacttttgtataaaccatcttggagatatggcggccgatcgtgttgtatgtaagtgtcggtgaatccggctgctgtcctgtaatctctccgtttggtaccagaccaagcttgatcagagcctggaatccgttacagataccaagtgccagtccgtcacgctcattcaataatttttctaccgcttctttcatcttcgcattcttaaatgctgttgcgaagaattttgctgatccgtccggttcgtcacctgcactgaatccacctgggaacatgatgatctgtgactgttcgatcgctttttcaaatacttctacagaatcaacgatatcagatgcactcatatttctgaatacttttgtgatcacctttgctcctgctctttcgaatgctttcgcactgtcatattcacagtttgttccaggcattaccgggataaatacggtcggctgagcgatcttgtggtcacagatataaatatcagatgtatcatataatcctgtctccaccttcgcatcctgtccttccgctccggaattggtcgggaatactttttccagtgtttcttcccatgcagatactgcttcgtctaacgcaatcttcacatcgttatattcaatagctgcgctgtctgttacttcaccaattacagtataagtaattccaagttcagataccttatcagccggtacttctgcgatgatatctccgaatgccggtgcaaataagtctcttgcgtctacatcgtgctcgatcttcacacccatgccgttaccgaatgccatcttgctgactgctgccgcaataccatgtctgtccagtgcataagctgctacgatcttaccgctgtggatatcttctgtaaatttaccgtactgatccataactttctcgtatacaggaatgtcgtaattatctgtctcaatacgaagccataccagtttatctccggctttcttaagttccggtgtgataatgtctttctcttttgcaatgtccactgcgaaagataccagtgtcggtggtacatcgatgtcttcgaatgttcctgacatactgtcctttccaccgatggatggaagtccgtatccaagctgtgcactgtaagctccgagaagagctgcgaacggctgactccatctgtgtggatcttctgtcatacgacggaaatattcctggaatgtgaaacggatcttgctgtaatcgccacctgctgcaacgatctttgcgatagactctgtcactgcatagattgctccgtgatatgggctccatgttgacagatatggatcaaatccgtaactcatcatacttacggtatcgcagtctcctgttaataccggaagcttggcaaccattgcctgcgtctctgtcttctgatattttccaccatgcggcatgaatacagaagctgctccgatggatccgtcgaacatttctaccagacctttctgtgagcatacattcaggtcttttaacatatcaagccatttttctcttacgtcttttacttcttctcttacgaggatgctgtcttttctgttcgggatatcaaccgctacggttgtctcctggtgtgctccgttggtatcaaggaatgcacgtgaaagatttacgatttcttttcctctccatgaaaggaccagtcttggatcttctgttacgacagccacctttgttgcttccaggttctcttcggatgcatatttcataaattcatctacatcttttggatctacaacaactgccatacgttcctgtgattcagagattgcgatctctgttccgtcaaggccggcatatttcttaggtactttatcaaggtcgatctgaagtccgtctgcaagttctccgatagcaacagatactccgcctgctccgaagtcgttacattttttgatcagcttgctgacttcttctcttctgaataatctctggatctttctttctgtaggtgcattacctttctgtacttctgctccacaggtctcgatagactcttctgtatgtactttggaagatccggttgctccaccgcatccgtcacgtccggtacgtccgccgagaaggataatgatatctcccggatccgaagtttctctgatgactgcacgtcttggtgctgccccgagtactgctccgatctccatacgttttgcaacataattcggatgatagatctcttttactgctccggttgccagtccgatctggttaccataagagctgtatccgtgtgctgcttctctaaccagtttcttctgtggaagctttccttttaatgtatcttttacagatacggttggatcagcggctcctgtaacacgcattgcctggtatacatatgtacgtcctgacagtgggtcacggatggctcctccgaggcaggtagcagctccaccgaatggctcgatctctgtcggatggttatgtgtctcgttcttgaagttcacaagccactcttcttccacaccgtctacttcgatcggcacaacgatactgcatgcattgatctcatcggattcttcctgatcctgtaattttccttcacgttttaattttctcattgccatcagtgcaagatccatcaggcagacaaatttgtcttctcttcctttgaagatctcgctgtgatcagcgatgtactgtttgtaagtctcttccatcggctctctgtaatcgccgtcgccgaatgaaacgtctgtaagttctgtcgagaatgttgtatgacggcagtgatctgaccagtatgtatccagaacgcggatctctgtcatggaaggatctctgtcttcttctgatttaaaataattctggatatgctggaagtccttgaatgtcatggcaagtccgagagaatcatataattcttttaacttattttcttccatatctttgaatccgtcaaagatttttacatctgccggctcatcaaatacggtaactaatgtctccggcttttcgccctgtgcttctctggaatctacagggttgatgcagtgttctttgattgcttcaaattcttcatctgataagctgccttctcctccatggatcacataagttgtcgcggtacggatgaccggctgctcatcttctttgataaactgaatacactgaacagcggaatccgctctctggtcaaactgtcccggaagaaattctacagaaaagattctgcttccttcttctgccggaaattcttctttatataatgtatctacaggtggttcagaaaagatgccattacatgctttctcaaatgtctcatcggatacattttccacatcgtagcgaatcagtacacgaacactgtccacgtctttgattccaagatagctgcggatctcagtcttaagctccttggcctgtacatcaaatcctgattttttctccacgtacactctttttacattgctcataagtaatcctccataaatgaatttttacacattttctattgttagtataacacaacattcattatttaatacaattaatatatctaaacacttttataatctgtacttattaatcctttatcattttcattcccgtcaatccttttttacagatttacgattcctctggctttttataatattttttaataacgaacaatacgatccatatcactaccagcaccgctccaaatacctcactgatacggattaccatatcagaaaagaatccttccggcagcatccggatcatataatcagtctccggattgaatatccatagattattggtaaaaaacagtttatgaaaaatcgtaaaacacgtcgtaaaatctatactgaaagcaatgccaagcagtacacctatgaccagccatacaccaagtgcgatcgaatatgccctgcaaaaaagtctcttccagtctttttcccgctttttaaacatcgtcagtatggctgcagctacaatcaggcaaactcccccgaccttaatacctcccaggaatagattcctgacatctcgcatatgcagccggtctctttcattgaagaaatcctgctcttttccttccaccgttgttacaactgacagcttctcttcttttccgatcagatagttcatcatatgttctgtcacgtacatgacatggtcgatgttcatatccagatcttctgtcacttcatatttctggtattcttttttgtaaaatccataatgactgtctccatatactgccgcccagatactgaatgcaagtgctgcgatcactgcacacatcatggccacaaccgatatgagcgttgttaatttcttcaagtttttttcctcctgttcttcattattataacacttctattgtaaatacggttgtaattttctttcatttcacttataatacagttaagattcattaggaggacttatcatggatattaactatgagttatataaagtattttactatgtagcttccaccttaagcttttcggaagcttccaagcagttgtttatctcgcagtcggctgtcagccagtcgatcaaggcattggagaaaaagctggatcagaccttattcatccgaagcaccaagaaagtacgtcttactaccgaaggagagattcttctgcgccatatcgaaccggcgatcagcctgatcaagcgtggggaaagccagcttctcgatgtcggcgtacgcggaggacagcttcacatcggagccagtgatacgatctgccgttatttcctggtgccttatctggaacgcttccaccgggaatttccgggagcgcatatcaaggttacgaatgcgacatcgatccgctgcgtagaactcctggagaccgggcaggtggatctgatcgttgtcaattcaccgaattcctatctcgggaatgttccgaatgtgaaaaagatcaaagatttccaggatgtgttcattgccaatgaagcatttaaagaattaaaaggaaagaaggtttctttcaaagaacttctggactacccgatccttatgctggacagaaagagtacaaccagcgaatatctgcacaacctgttccttcagaatcagctggatctggttccggagatcgaactcagcagtaatgaccttctgatcgaccttgcccgcatcggacttggaatcgcatttattccggatttctgtctttcccagacagccgattcggattctctgttcattgttgagacgaaggaatcgcttccggaacgcgaacttgtcattgcgcataacgagaaggttccggtatccaaatccgcacaggagtttttatcttatttttaatatgtttacaaactctttttcctgccaaagtatccccgaaagaactaccggtggcagctacttttatttactttcgcataaaataccatgtggcatatgtccctcatggtattttttcctatcatattgttctataatatatttttctataaataatatttttctgattctgcttacctcttatccatctgttcttccttccagaaccctgctatcttttcttcgatattttcactgttacagatctggaaatcattccactccctcggaaacacctcctggcaccgccggtccataaaacgttcatccaaaagtgcaatcacccctctgtcctgatcagtccggatgactcgtcctgccgactgtagcaccttattcatgcccggatacaaataagcataatcgaatccattcagattcttccggtcaaaataatactttaaaagttcccgttccagacacacctgcggaagtcctgtcccgatgatcattgccccgatcagtttatcttccgtcagatcaattccttctgaaaaaataccacccatcacacagaagccgatcaggctgtgtgctctttcctgttcgaattttttcaggaattcttcccgttcctgctccgtcatatattgggactgtactgcaacttcaatctgttcctgcggcagttccatgaatgcttcccacacttcttccagaaatcggtaagacgggaaaaaggcaagataatttcctgttcttccttttatcacacgcatcatatattctgcatacttacggtacatctccggtccgcgtctggtatacttcgtgctgacatcatttcccagaagcagtaatcttttgctttgttcaaatggagattctgcatagatcgcataatcatcctttgccgcagataacagtttcttataataattgattggaagaaatgttgccgaaaataatatcgtactatttccttttcccatatattcctgcaggcatcccgccggattgacacagaacagatgcaggtaaaactttccttcttcacttagttctgaataaatcagataattttcatccagccggtcatgaatatatatgaaattacggataccaaagtaaaactccagtacccctttccgtattacttcatctttacagtcttctataaactcttccagctttgtcatcaaagacaatagcttaatatacacatgtgacacactattcagtatctggcagccgtcacattctctttttaactccagaagctgcttattgcagctctccaacgccgagacaagtttcggttctccgtattttaccagctttttgattttcagaaaatcttccttgcaaatactggtgctgtacatggttctcccacgttcgaccagattgtgtgcctcatcgatcagaaacagatattctcctttgacgccgtctccgaaaaagcgtttcagatgtgcattcggatcaaagacgtaattataatcacatataaccgcatctacccactgcgatacatccagtgccatttcaaacggacacacattccatttccttgcctgttcttccagcacttcccggctcatctcatctgtcgatgtgagcagttcataaacagcagcatttacacggtcaaaatgtcctttggcatatggacatgcatccggattacagatagtttcctcacagaaacagatcttttcttttgccgtcaatgtgatgactttcatcttcagatcctgcttcctcaggatctcgaatgcctgacttgccaccgttctggtgatcgtcttcgccgtcagataaaagatcttttctcccagttcttccccgactgctttcaccgccggaaatacggccgccattgtcttgccgactccggtcggtgcctggataaataatttcttttttctcaaaattgtcctgtataccgacgcaaccagtttcttctgtccgtctctatattcgaatgggaattccactgttttgattgaagcatttctctttgctctccattccatctggtatcttgcccatttttcatattctgatacaagttcttcgaaccatttcttaagttctgcccgggtatatacctcctggaatctccggatttcttcggtatctaaattacaatacgtcatctgtactccgatttcttccagatttttctgttctgcatagatataggcatagcattttgcctgagccagatgtaaaagctgcggttctttcagacgtttcaaatccttaaatactcctttgatctcgtcgatcaccacacgcttcggaagttctatgatcccgtccgctcttccttctacactcaggataaatccatcgcacgctatctgatactttaacgagacctctgcacggtactctgccccctgctgtctctggattttccggtgtatccggccgccctgctgcatagcctccttatctgccccgccggtccgattgtcaatgtctccatatctcaatataaattccaccagattccgcaccgaaatgcggatacacggttgttccagattcatgatctgctctcccccaatcgttcttcatacatcggtcgaaccgctcccgtcatccctacgatcacatcgatcaccgtcatgatatctccgctccggttcttctgataagcatggtagcttccctgaatgcaaaaactcaacatcacgttcatcgccgtatcttcttcaaactccggatatttttcaaaaatcatctgcttgatactccgctcaatactgtccgcgaaatgatttgcctgactgccggaaaataatattgccgtcagagaattctgagatatataggccatcagaagttcccttgcgaattctgccggatgctccagaagatattccggatgctgaatactgttcgcaatcgactgtaccacttcttcttccatcgcatctgacagatcgtagatatctttataatgtgcataaaaggtagacttattgatccttgcactttcacataattcttttactgttatcttttccagaggttttctggaacgcagttcgataaatgcattcttgattccccgctctgttttctcaatcctaagatccatttcattttctcactttcccgacactttttcccattcgtcggttatccacccattcgtcggttttgtcggtggataccttctcgcatttctcttataatatgattatagatcaaaaaagcaactactgtccattatcttttcggcagttaattatttacgttgcatttttacggaggttaatatggatttttacggattttacacaggaaaaatattcgacgcctatgaatttcttggcgcacacccggacaaagacggaaccacattccgtacctttgcacctgctgcatcacgcattacagtcattggggaatttaacgactggcaggaatgggaacttaataaaacttatgacggaaatttctgggaatgttatgccaaaggtgcaaagccgggcatgatgtacaagtaccgcatctacagacaggacggaaactgcgtagaacactgcgatccttacggcttcggcatggaactccgtccgaacttcgcgtctatcatccgcgacctgtcccattacaaattcaaagacagcaaatggatgcagaagcgttcagtatgcaaggacaaaccactcaatatctacgaactgcatttcggctcatttaagaagccttctgaaaaggcagacgactggtacacttatgtagaaatgatcgacatcctgatcccttatcttaaggaaaatgattataactatatcgagatcatgccgctcagcgaacacccgtgtgacgaatcttggggatatcagaatactggattcttcagcccgacatcacgctatggaactgcagaagaactgatgaaattcattgatgcctgccacaagaacgacatcggtgtgatcatggatttcgtgccggtacattttgccgttgatcattatgcactggccgattatgacggaacttcactttatgaatatccacatcaggatgttggtgtcagcgaatggggaagctgcaacttcatgcattccagaggcgaggtccgaagcttcctgcagtctgctgcgaactactggttaagcgtatatcatgtggacggaatccgtatggatgcaatcagccgtatcatttactggcagggtgaaccggcaagaggtgtcaacaataatgcagtagactttattcgtgaaatgaaccgcggattaaaaacactgcacccgacagctatgctctctgccgaggattctacttctttcgaaggcgtaacaaaacctgctgatcagggcggacttggattcgattacaaatgggatatgggctggatgaacgatacacttgactacttccgcaccgcaccggaatacagaagccgcgattatcacaagcttacgttctccatgatgtactattataacgatgttttccttcttccgctttcacatgacgaggtggttcacggaaaggcaaccatcgcccagaaaatgcatggagaatacgaagagaaattcccacaggcacgtgccttctatatgtacatgtatgcacatcctggaaagaaattaaacttcatggggaatgagatcggacagctccgtgaatgggatgaaaaacgtgaacaggactgggatatcctgaagtatccaattcacgatgcattccatcacttcatgcagaaactgaatcatctgtatatgacaactccggctctttctgcaaaagactatgaaaacgccggcttccattggctggactgtcatcagaaagaacgctgtatctacgcttttgaaagaacggatggcaaagaacgtattgccgctgtctttaatttctcggatgaggatcagaaagggtatgaacttccggtggaagatgcgaaagaactggaagtgattctggctagtgatgatgaaacttttggaggatgtaagaagtatacgaagaagaaagtgaaggttacggacgggaaggctgtgctggatctttcggcttattcggcggtgtattattcgattgctgtttaatgcattaagcgacggctgcccggaccggaataaaagttaggaatcctttattccggtccgcgtaaccggtctgatgaactaaatagcaatttacttcttcttcggctacgactttgatgaagccgcgctcttcctgtgtgatgatagatttcccatttgcgctcatgatgaatttaccacattttacggcaattcctttttctttcgcctggtcttctgtcattccggcagatgcaatctccggatctgtataaacgcatcccggaacgatactcagatctatggatggttcttttccggcaagcttttcagctacaaccattccctgtgcgcttgccgcgtgtgcaagctgtgcaccaaagatcagatcaccgattgcatagactcccgggatactggattcaaggttttcgttcaccagcacacgtccgcgttccatatccggttttacattttctccgaacagtccatctgtattcggacagcgtcccactgcacacagcacatactctgctgttacttcctgttccttttctttctctatatagtgacaggtacaggtctctccttctactgttacgccctgtactgccacagaagtatggatatcaatgcctcgctttttcaggatctgttcctgccagttcgtataacttacggaatactgcgatcgcatcatccagcgtttctttcgattcggtctcggttggctctaccatcagtgcttcatccacgatcaatgggaaatacattgtaggcggatgaataccattgtccagcagaccttttgcgatatccattgccgagataccggataaccttctgcatacttattggtcggtacggttcccattgccagcatcactgccgggcttacaatattttcagatgcgatcagctccagatttcttctctgtctgccaagctctaatgcaagtgcttccccaacttctttgtcacattctgtgatgtagtttgttacatcttcgattctgttcatttgtttttacctccttcggaatctgcctgcttttcgcgcccattccccattttgagcactaaaaaagcaggcaaaaaatactttcttttcaaaagtgttttttgtctgcctctgtccttttacctgaaagattacttcttcggtacaattcttattgttctccagagcgtcgtccgaattcgttcccttttacctgagagtttctgcatgccccttcggctcctatgctgcatggtatctttgcttccttctacgcattttattaaaataatacgttccacttcatttatgcactttgcacatagacatctcgcaagttcacccataaactatgcaatcagaacaacaggttatgtcctttaagtcaacagtaaatccataggttaattatttatcacaaaagatggtacctgtcaaagcatttcaactctgccaaataccatcttcttatctccatctcttaaagcttatttactgcttccgcaagataatcattgcttacttctgcaaagttctcattctccactgcctctgcaaggcttgcatcgatcggcatcttaccgatgaccggaacgccgagttcttctgccacttcgtcgatgtggctctcgccgaatacggagatcttacgtccgcagtccggacattccagataactgtagttctccacgattccgagtaccgggatatccatctgtcctgccatgttgtaagctttctttacgatcatgcgtaccagatcctgcggagaagttacgatcacgatgccttctaccggaagggactggaatacggtaagcggtacatcaccggttcccggcggcatgtctacgaagagataatccagttctccccatgcaacatctgtccagaactgtgtgacaacacctgagatgaccggacctctccagataaccggatcatcttcttccggaagtaaaaggttgatggacatgatcttcgttccatcctttgcctcacatgggaaaatattttctccatccccttttgctttttcatggattccatacatcttcggaatggatggacctgtgatatctgcgtccatgatacctacagaaaatccctgttctctcatcagccttgcaagcgacgcggtaaccatagattttccaacgccgccttttccgctgacaactgcgatcacatggttgatgtgtgattttttattttccggtttgatcagactctgcggtttgcttccgcattcacctgcatgggaacagcccgcacaatcggacgggctgcagcctgttttttgttcttctgccatttgtcttactcctctacagccgcaataagttctacttcacacagaactccctttggaagtgtctttactgcaacacagcttcttgccggttttgatgtaaagtattttccatatacttcgttgaatgctgcaaagtcactcatatctgcaaggaagcatgttgtctttaataccttgtcaaatgatgttccagcttcttttaagacctctcctaagttcttacatacctgctctgtctgtgcttcaattgtagttgcttctacatcattcacttccggattgattgcaatctgtcctgctgtatacagtactccgttgtgtacatatccctgtgagtatggtccaagtgcctttggtgctttttctgttgctacgattttcataatgttatttctcctttgctacttcatataatttctgtgcgatacacacatcaaataatcccattccaaccgatttgaaatatgttgtctgaccttctttgatctctttttcccccgatacgagatattcatgcatcagttttatgcggtcttttgtaagttttccacttgccaggggctggcttagatctccgctttcctcacatgcgtatggcagttctatgtatacattgtccaccagatccagtactgcatccgggatttccctcatctccggcatataagagccgatcgcaatgatgcattttcctctcagaagttctttgtcatccggaagaacaggtgtggtagaaggagttgttgtacagatgatatcactgtttcgtacaagctcttccactgctttacattgtactacctttacgtcttccttatcaatagcttttttcagtctttccagataatctgtcagatcacggtcactgtggttgaacacatatacggtatggatatctcttgccgcacatgcatacacagcctgatggaatccctgcattcctgctccgatgattcctacggtgcgacagtcttttcttgacagatggcggatccccacaccgccgacagctccggttctccatgccgttaccgattgcccgtccataacagcaagcggcgcgcctgtcgtataatcattcagtaacacgataccatctatcgacggcagtcccagtttggaattctccgggaagatcgacaggatctttgtccctatgatatcctttgtgtaacatggcatatacatgagctgcttattttcatgttctaccgtcggtcttggcggcatatagaactcacctgatccatagatccggtatgcctcttcgatctgatccatcatctgatccggatcaaccatttcttcgatctgctccttgcttaatacgatcattttacatttcctccagttctttttgttcccttgtgacatctctcagccacttgtatgtcaaataccgctttaaagtaatcggtactttgatcagttcatcactcatcagtataacatagacgaccggcacactggcatgcaaaataaatgccgccactgccccgagtaaaatggagaatccccacatcgtcgatacatccatgatcaatccgaatttcgtatctccgcctgcacggaatacccccactaccattgtggtattaaatgcctgtgccacagtaaaatacgacataacgaagaacatgaaacttaagtaattctttgccggtccggtcagtgccagattcgcattggcgattggtgccgagatcagtatcagcacaccacccaggattccaagaatcagacttaaccacacgaaacgttttccgtatgcttttgccagttccatcttgccttccccgatcgtcttgccgagatagatcgccgttgcatgggaaatcccgaatgttacgactgttgccagctgtcttgccacctgcgcaaccgagttggctgccactgctgcgcttccaagatgcccgatcaccgccgtattcgccgacgttcccagtccccacatcagttcatttaataccaccggcatagaataaactgcgaaatcttttaacagaaccttatcgatcttcaccatatctttaagccggatccttactactttatttcggaagatggcataaacgagaaccatcactgtctcggctgctctggcacacagcgtaccgattgccgcacctcttactcccattaccgggaatccaaatagtccgaagatcagaaccgcatttaccacaatattcatcagcaatgaaatcagataaataaatgtagccaccattaccctctcgatactgcgcataatattcagatacacctgtgtcaccgccatgaacacataggaaaatcctacgattcttaaatactttactccttctgcaataacttccggatcagaggtatagatccgcatcagtgtctccggcatgccaagggctgctcctgcgaatactactgcaacgatgagtccggcacttaatcccatacccaggactttctctatcgttctggtgtctttcttcccccagtactgcgccgtcagaaccgttgctccggaggtcactccgtaaaagatcagtgtcatgatgtattggatctgtcctgcaagagatgccccggataacactttctctccaacctttccaagcatgatcacatccgtcgccgtaactccgacattgatcagattctggattgcgatcgggatgaccagagcgaatacattccggtagaattgcttccagttgattgtttttgtatatttacttttttcttccatttattttttctctgctcctatttattcttatcacattttctgcttctctgcagataatacaccgcaagctgtgtccgatctcttaattccagtttctcgagcacattgctgatataattccggaccgttccttcgcttaagcagactttctccgatatctctttgttactgagtccctcagcaaccagtgctgtgatctccagttcccgttctccgattccgtaactgttccagtcaaatgtctgctctttttctttctgctctttctgaagcaatcccgggattctggacataatctcagttccgaatacggtctgattcatctgcaccgcctgcaatgccggaaggatactgccgtaatcctgttttatcagatatcctttcacaccatattttaatgcttttacgatgtacgcatcatcggaaaacgtggtaagcaaaagaatctttgcatccgtatgccttttcaaaatctgttctgcggcatccagaccgttcatgtccttcatacggatgtccatcagaagaacatccggcagcagttcatcatataaccggacggcatcttttccatcctgtccggtgccggttacttctacttctcctcctgcttccagaattgtctttaacgcactggataccaggatatcgtcatctacaattactatcttcatctttttccctcatttttaggaaccgtaataaatatacggaagccattttctttctggatctgcatggttccgccaagcatgcggacacgttttttcatattctcgatcccgattccgctgctttctgtattttctgtttttcgagcgttttcggtctttccggcactttccttctcggcatattcttcccagtctccatctggccggatccgctcatctgacgttccattatcttctatgatcagctgatatagtccgggatgttctcttgccaaaatcttcacctcatttgcattgctgtggcgcatcacgttattcagtgcctctttcgtaatggctataaagctgtatttgatctcttttggaatgtcatatctcatatcataagtaagctgtaccggacaaaaacggaattcttctgccagcgattccatcacttcttttaaatttaccgactcatcatgcagatcgtgcacgctctgtcttacattcgtcatggcttcgttcagcgtctgatccagctgctccatcgggactttcagattctcagcctgattaacagtctttaacgctcccaccatcaggatggaccgcgacagcatatgtcccacattgtcatggatctctctggcgatacgattccgttctttcagtgtggccagatatacttctgtgtcctgctttttcaacagatcctgattcttcttttccagcatcagtgtcagttctctgctgtcatctctgacccttttatatttctgctccaattcatttagcctcctggtccgtccatataacagaactgctgctgccagcccggcaacaataagcatctctttttccaacccgtaatattcccggaacgccggcgcctcacaggccacgattataccaccaacccctatataaaccggagaataaaagcatagcatattatataaaactaccggaagaaacatccacatttctttaaaaacaattccggctgccacgaaagcaatcgtcataatgtaatgcagatacttttcttcccctaccagattcacacaggtatagatacacgcaaacagaatagtgataaccgccggaatccctgtttccgctgttaccagaagtcctgctccgtaaaggaacaaacatccttcatctgttatctttctcattcttttctcctatattacatttgtcacattcaatttatgaccggtgacactaccattataatcagccatccgctatactacaagtaacaaatcatcaaggaggaaatcttatgcttgtacatatagaaaatctggtaaaacgttacggtgatctgttagcgcttgaccacctgtcactcgacatcgaagaaggtgagatcttcggactgctcggaccaaacggttccggtaaaaccaccgccatcaactgcttgctcgcactgttaaaatatgacaaaggaacgatcacgatctttggaaaggatatgaagccggacagctacgatatcaagcaggatatcggtgttgtcatgcagaacgttgccgtcttcgagcagatgtccgtctatgaaaacatcgattatttctgcggactctatatccgagacaaacaaaaacgaaaagaactcgtggaagaagccatcgcattcaccggtctgtccgatttccgtaagatgcgcccgaagaaactctccggcggacttttacgaagactgaatatcgcatgcggcattgtccacaaacccaggctcatcattatggatgaaccgaccgttgctgtagatcctcaaagccgcaacaagattctggaagggattctggaactcaaccgtcagggatctaccatcatctatacctctcactacatggaagaggtggaacagatctgtacccgtatcgcgatcattgatcatggccgtgtacttgcttccggcacaaccgaagaactaaaaaaaatgatcaagaccggtgagacgatcacgatcgaagcggttgcgttaacgaaaaacaacctggcagatatccgctccctttcacatgtatttgacttatcataccaagatcagacaatgatcctacgctgcagcggtgcaaaacacaatctgatccgggtactgaattacctgcaggaacaggacattccattcggacgcgtcttctccgagcttccgactctcaatgatgtcttccttgagatcacaggaaaagaactcagggattaaaggagggacactttatgttacatttattaaaatatcagttcttacagacaatacgttcccgctctatcatgttctgggctctcgcatttccgctcatccttggaaccctgttctatgtgtcctttggaaatgccggtcttgcaggaaccggagagaccgactgggaaccggttcctgttgccatcgtcacagtggaaagcagttccgcaaatgcagcatctttcctgacatttctgaatgaaacggatcaagacatgatcgatatccattcttacaagacagaaaaagctgccaaaaaagcgcttcggcgggaggaaatatccggcatctattacgtgaagtcggttccttcccttaccattgcttccaatggcattaaccagagcattctgtcttcccttctggacagctatgaaaagaatgctgacatgatccgggatattgccacacagcatccggaaaagctttcggacgccctttcatccctgaacgactaccagacactggtgaaagaaaagtccttaggcggacattccttagatccgatactgacttattttctcgcactgatcgcatttgcctgcttaagcggagtctacttaagcatccattccacggttcagcttcaggcgaacttaagtgcactcggagaacggcgcagcatcacaccgacccacaaactttccctgattctcggcgatctgctggtactggaaagtattcatttcgtcaacattctgatcctggagctttaccttacccaggtacttcatatcagccttgggcatgacattccgaaacttcttctcattacattcatgggaaccctgatcggtatctgtctcggaattctgatcggatgcgccggcaaactgtcctacagtgtcaaatccggaatcggtgtcctcgttacactgttaccgagtttccttgcaggcctgatgttcggtggaatgaaaaatgtgatcgaacagcactgcccggtcatcaatcggatcaatcctgccagtgtcttaagtgatgcattctactgcctcagtgtctatgataatgctgtccgctaccgcaggtgtatcctgattcttgtaatcatgtgcctgctttgcatcagcttctcatttctcatgataaggagggaacgttatgacagtatttaaaggatttttaatcataaccaaacgcaatctcctgatggtattcatgtatctggcaatcttccttacgatcggaatccttgcctccggcagcgacagcaatacttccggcagcgggttccatgcccaaacactcacggtaggtgtggtagatcatgatgggggcgtgctttccaaagggctttccacatatttatcacagtatcataccgtcaggcaaatgccggatgacactgcgaaactccaggacgcactctttaaccggaatgtctcttatatcgtgaccattccggaagattttaaaacctcctgcctccgtgagcatcaggcattaccggtatccaagatccccggaagcacagacgggtactacgtcgatcaacagatcaatacctatctgaatcaggcacgtgtcctgacagacaatggttattccgataaagaggcagctgcatatattctgaaacatgcagacagttcttctcatgttacgatgttaaaatctgcttcttccgaaaagacgccgggttatgggtacatgtatcagtatctgccatatgtgttaatctccatactgtgttatgtaatgggactgatcatgatcgcattccatcagccggatctacaaaaacgcatcctttgctcggctgtatccatcagaagccagaatctgcagcttgcactgggatatctggcagtcggatgctccgtctggatgcttacaacatggatccctgctttcttcttttaccggaaagcatttttccaatcgccaaagatgccatattatatgctcaacagtctgaccctgcttctggtcggtcttgctctttccttccttcttggtacatttatcaccaaagaagatatcctgaccgccctcgtaaatgttgtcacacttggcatgagcttcctatgcggcgtattcgttccacttgatatcatgggaaaaggcgtgaaaaccgtggctcattttcttccggtctactggtatgagatcagtaacaatctgctgaacaactctgctgttctcactcaggcacagagacaactcttataccgcagctatggaatccagttactttttgccgctgcgatcttctgtatcgcactggtagtcagtaaaagaatgaggcagacagcataatgctgcctgccctgctcttttttctatctctattttatctttttcttctgtatccattccacaatcttatagcccagatatccagaaaggcttccgaataccacaccaccgatgatgtccgttggataatgcacatacaggtacaatcttgataatgcgatcagaaccgcaagtacaagagccgctttccacatcttcttctctccggcaagatacaatgccgtaaccgaagcaaatgaagccgccgtgtgtcccgacgggaaagagtaatcccgcggctttgcgaccagtaattgtactgctgtattgacatcgaatggtctggttcttgccaccagattctttatgaccacattgcagagcaacacatccgccagcaatgccgccatcatgatcactcctgtctttcgtgtctttggaatgatcagtaataataccgtcagaatgatccatatgattcccgcatctccaagtctggtaatgagcggaacaaccacatctcctattggcgttcttaaattctggatcatatcaagaatatgtatctccatctatcttatcctctcaaattgatttttcttatttatatttcccctctatatttttccatctgtcttttctgtcctgagtaccggcatccggaatgtctggatcaaaagcgggattaccataatgaaccacacgatcggttcacagatgatcacacccgtatatccaagccacggaaccagagtggccgcgatcacgatcttccctgccatctcaaggccgctggaaatcagtggtgtaatgtgatcccctaatccctgcatcgcatttcttaaaatgcagatcaaggtagtcacaatataaaacagcgtatcaaacttcagataatttgttgcatttaagattactgtcttattatgacttccggttaccagatataccagccatcctccgatcgtataacttgcaatgatcgtaagtcctgaccagatcgcagtgtagacaatcgccagccagatgcctctcttcacacggtcgatcttccctgctcccacgttctgtccacagtaagttgccatcgtctgtccgaatacactgaacatgatcatgaatatctccgtgatctttctcgccgctgtatgggcaatgataatgtcttttccaagcttattgatcgccgtctgtaatgtcaaagtaccgatattaaccagagaactcataaatcccatcgacattccggcacttatcatctcttttaccatgattggacttggatctttaaaatcctctttctgaagccttaatatctcatattttctaatcatatagatccagcagatcacaaatgcaatgatctgtgccagtacagttgcaattgctgctccttttacgccagtcttcaataccacaacgaagaacagatcccccacgatattcagtgctacagatatcgccagaatgatcaatggtgttactgcatctccgattgcacgaagcgtcgccgcacaggcatcatataaaaatgttgcaagcagtcctgctatgatgatcgcgatatatcctttcgccaccggaaccagatgctttggcacatttaagaaatgtaagatcgatttcaaaaatagcagtcctgctatcgtaaataaaatggatattccagtcccgatcacaagcgacattgcaaaggactttttcatatctgcgatgttcttcgcaccaaatttctgtgcggtaataatcgcaaatccgttggataatcccagtaaaaatccgatgatcagaccgctcagtgtgctggtcgcacctactgctgccagtgcatcttctcccagaaacgagccgacaatcctggtatctaccagactgtaggtcagctgtaataagtttcctaaaaatatcggtaatgcgaaacttagtatcagtgccgagggctttcccttcgttaaatctttcattctttctcaatgtccttcctttttcagtatgattttctctttacaagaaaacatgcaccgctcattatagatcatacttccgaagagagcaatctctgaaagaattttttccgctttctttctgtcaccggacttccgctgcggataacctgtgaacggattccgatgttggtcagttcctgctgaagcttaacggctttctccgcatccataccatcccggatcagaaatggtgccatagacaggtcttccttcgtttcaaaattatattttttcgcaagctgtaagaagccatttctctgaccataatattctacaattctcccaagtacaatgacctgtctggatggatagccgcacacctcacatgtttcttccagtggtgtgatctcgtattctacttcataaaaatcaaacgcctctttaaaatattccatgccttcttcgtccagattatcaaacagtgtggctggaaggttcgatacgatgcggttagccatcactttatcgaggcctgtcagaagctgcagataagcggatatcttctggtcttttccgctgcattttaataaacgtattttatatgttctcatgtaatttttatcctctttctgttttcagatatttttcggttatgctctgttctgacgccataatatcctctggcgtgcctgctgctacaatcgttcccccggcatctccatctcccgggcccatatcaatcatgtaatctgcattcttcatcacatccagatcacgctcgatcacaatgacaggtgctacatttcgctgtagttacctatcatgtccggctctacctgaacctccatgaaagttgttctttcgggtggggtattgcttttggatgtatgtgaatatttcttgttggttcatgggggattccttctttttgtcaataaaataatctccccgttggacacatcacttgagtttgtgagaggtgtggggagatctgggtttgtggttttttatgttttatgtactgtatttttcaatatgttataaatacatttaattaaaaatagttcattccatttatctgcataaccgcaccaaaagcaactttattacgatctgtatatctgatattcggtacttttgtaactcctcttttctctttttcataattttacagaaactgattgtatttctcatttatacgataaaaatccatatttatcctccgtagcaaagcaaaacagggagatatacacttatctccctgataattaacggttcgcattcaaagctgcgaagcacttaaattaaaggttcacattcaaagcagtgaaatacttaaattaaaggcttgcactcaaagtagcaacgcacttcaaattgaacaaatctctttgttcaactatattatattcaatttctgtaaaaaatcaataaaattttttctttatattcgctcttccctgtttgcaaggatattatttttcaatctcttttacattttttattcgtgcaagactcgttttccaaatttcgccactataataaacttttatattatctcccggcgatataactgaataatcatatttttctggccaataacagattatttcttcttgtatatctgtttctagtatttaaaactgctcatttttttcattctattgctccgctttattattgaatcattttttatttgtgctttttatttccgctaccagttcttcatacttacgttcgtcaataatatttttctgactgattgcatagatattgcttataatcagtattaacgcaacaaccgcctgatcaactgcactggccagctttgttgcaaaagatcttactgctgagataatactgtcatgtcgttcatgaaaccggacttcatcatactctatggtattatttaacatgacaattatcgtcatattgaatgctccctgcgaaaagaagatcaggaaaccgatgatattcagtaaaacaatactctttggtaaaatgtagcctacactcataaaaagcatataccctatgactttaatgatggtagctgcagttataatctgatttcgtgtgaattttgaggaaagccacgcaaaagatgcctctgatatcagcattcctaatccatacataattgtaaaccaaaatacaagactgccgcctacagaatatccaaattcaaaataaaagaaattcattccaatcataatctggtgacacttgggaaaaaggcatacaggtggaaaaaggtgacaagggtgacactgagtcgaaaagcgaacaaggtgataccggggaaaaaggcgacactggacctcagggtgcgaaaggcgaaaaaggtgacaacggggagacacccgtaatcaccgtagttgaagatacacttctcacatcacgcaatgcttgaatcaatggcgcaaaccaacgcaagaatgccgccttggaagatttttcccttttacctcggctttgtcttgattaacctattccggtacaatccatgcgctataaagtgtgtaaataattctgtgtaaactaaatacgtgatatgtatcctctgaatattacggtgcggcagagccgcctgtccggtgtggcgagagccacctgtccggactaacgtagccaccccattttgtttattaagttacttttccattgctggattcagtccatatacttctctcatagagaggtctttagatgggtcaacactttcaatatcgatcttataggaatcatacgatatacgatccatgatggcatcggcaagagtactttcaccatcacagatttgctggtaccattcactttcacggaactgaaaacaaaagatcgttgaagattttcttcgtcgtttatgtatcagttcaaaaagattcctggcttcagcttctgtcagtttaagaagcagccactcatcaatgatcagtactattggcttggtgtatttcttcaggacagtcgagaaagttccattgtccctggcagcctgtaagtccaataatagatcaggaagccgtacataccgtactgagtaatagtgcttgcatgcttccatgccaaaggcacaggccatataagttttaccacttccggttgctccagtaataaagatgtttcggtattctgtaatgtattcacaggttgccagacggttgatcagtgctttgttcagctttcgtccagaatggtaatcaatcgctgcgatgctggcatctggctgttcaaactcagccttttcagacgattgtttttgcggttgctgtattcgacatcaacaagcatgccgaaccgatcttcgaatggaacttccttcattgcaggatcatccatctggatgcggaatgcatctgccatagcagtcagacgcatttcaataagtttatcgattgtactttgatttgtcatgattttttacctccatagtatctggctcctctggttatgccatgtggttttactgcttgaaatgattctgattcggtatcaggtgcatcctttgttgcagccaatagatttttgatacttttatagctgggtttaccggaataagagagcgccttagcgcagacctgttccagtttttctggcgaatatttttctgccagtttcagtaatcccatgcagcttctgtaggattgctgttcaatcctgccggaggtaagtattgcatcgacaaccttacttgtgttaattccaatcgaatcagcccacttacggaatcggtcaccgttccattccagatatttctggtgttcctgcggcatatgttctgtcactgtagaatactgaccgcttcgtccatagagtcgtctgtgagaggcaatacgattgtgattataaaatatttcaaccgttgtatctgttatacgcacatcaaccttatttttgatatactgataaggcacggagtagaacattctgtctactgcgatgtgatagttaaactggacggtggcttgtttccactcagccagttcaaaaggtgtagcaggcaacggagccagtaatggcatttcttccccaagaaataaactgagtctgctacattcctttttctggaatttacgggcattgtaggcatccagtttttcacggattgaagcattcaattctgcaagagagaaaaactgttcattgcgaagggctgctgttatccatgtggatatctttcctaccgatccctctacattcggtttatctttgggtttccggactctggccggaaggatggcaagattgtaatgttctgccatctcatgataagttgtgtttaaggcagtgttgtaccagtcactctttttatgattcactgcggttgtgcagttatcagaaacgagcataggtgtgacaccgccaaagaaatcaaatatctggacatgagctttgatccagttgtcggttttctcattcatatatgcttttacaaaagcatactgactgtaagttaatacacctacaaatatccatgcatttgtgatttctccggtgtccggatcaatgatgtgagcagggtcaccggcccagtcaacttcaatctgttcacctggttttctaggaatatgcatggtagccctgcgtttttcttcatccttctggatgtagtagcagaactgagaatacattagaggctcttcgctgctcatgcggcactcctcacagtattctacccagagaagttttttgtttacgccgttccgcagaagttctttgcggatgtagtcaaagtttggcatacgtttattcgttgccgacttatctttaggaaacatcagctcctctagcgcactgtcggtcatgtcaaaatccagcggccatgaaagattgatttccgctgcttttttcaaaaccttggcgactgtgtttctggatacaccgcaactttgtgcgatgttcttctcactgaatcctaagcttttcaagcgtaggatttcacgatacttggtcataatttacaacctcctttatctgtattcacaccaaaggtgtgtatttacagtataaaggaaatatatgtaatagagtccaataaggtggctctgaattaccggaatatatggctcccattctccggaatggtggctctcaaagtccggacaggtggctcagagagtcccggaataatcaagcaagagctaagaatcccgtacacaatcatttccatgtctttttcataaatctaatgctcctttcattttgggtaataaaataaccgtccaataagaacggctagaaatagaaaaggaacgtcatcttaggcattccttttctatgagatattcaattttaatgcttatgtgctgttccatatatcttgcataaaagtgtatcacaacgtatcaagaaccattcaatggtaataaattgatatgtgttactccttgaaaatactaatacatactgttatgaacacttattactttaaacatgatttctatggtctaacttttgtttttttggatatttcacttttgcgcttattgaaagcattatcgatatatgtttctgggtcatttttaaaatcttcccatttgacaagaacacaataacgctcatcttctgaccaagaacatccactttctttaggaatataataattataactaaactcttttatggtagtattatcgtttatacatacaatgttgtggttctttccacatactgaacactgctccttacctttatatactttgtcatacatagaaggtaaaacgatacctaatataccattcttcgtattgttctcaccattatacaaagatgcttgcaattctcttttaatatatgtttggtcttgtagaaatgaattttcagcactatattctccaataagataaattgtcactgtagaatcagcaagataatcctctctaattttacgcataatataatcttcatcatcagaattgatgggttcatccaatgatttatctatcatatcaatatccatatcttcttgaatctttttcttataatccatatcttctgttttaaaagatataaaacatttatgtgccatattaagcctctcctcttattattcaatcataagtattttctttgtatcagcaatagtattcttgtatgtttctatttcccattcaatagtagtgtttgccaaaaactctgcttcatatttttggtagtttttctcatcctttagacaaagatagcaagttgctaatgttgcatacatccaataatttatttcattgtctctaatattttcttctagtaacgatataatttctctgcatacctttttgctctcaaattttaaatattcgatttcatctacttctaaatctggtttttgtgttttgagtaataaacagtttgaataattttcaccattatagtagtcattttttattataaatccttttttataatagtttattgcttcgtccaagtaatcataattcttatttagtttaaataaattcttataaatagcaccagtgatacctatagtctctaaatctaaagatttttttggatttaaagattgtatagtattcaaggcttctccaagagctagagttgcattaggatacttagatttgtattgcaccaaagctaattgctggacaacatagtcgttatttggtaatatatcccgcaatttcttccattcagaaattgattccttgaatttactttcattttttaaggcttccgccttacccacaagatttgatattgtttcttcttttgtcttggctgtatcaagcaattcatctaattctctatcggatatattagggggaactatattaggtaagtatgtatatagtggactatcaatgttttgttcttcacttgctttgatgaacgaatgaagatttgtttttattttttcagcttcttcatcatctaagacttcaccgaaatctttataggtgagaatcctacaatgatttaagtcaaaaggaattttctcactttcctgcatcataataattgttgagaacggtttcgatgcatgtcgaatcccaagttcgtatattgcattttcattcatcgttgtaatatcagctattactaaatctgctttcaacaataatgagtacatactaacatcaattatttctgagccagaaatttcatcagctctaatcaattcatattctgttaagctgtcaaataaatttttaatcacttttttataaatgatatctaaatctacctccttagaatttcgatagtccatcttcttaccaaatcccattgctacaaaacaaatttttctagacacaaataaactctccttttcttcaaaattataaagcgtaattccttatagttgaaattaaactagcagaattccatccaactaaaacagtggcattattttgtatctttaaaggaacccgttcatttccccacggtttaattgctattataggtttattcattcgtattgcttcgttaatttcataatcaatccattcactatacaaagtatacattcccgatactactattattgcattacaccctcgtatctgttgtgttaactgctcttttaaagcagtttttgtctttgtattaaatgggttatctgccgaaactgagtggtttgaccacttaaagtttgaagctgtatttagccattcgagaatagtatcatactgtgtagaatacttccatgagtgacttataagtaatcgatagttttttaattctggcataatatccctcctatgttattatccgtaatatttttctacaataattatactacaaaacaccctaatatcaaagatatttcaactattacataaggaaaaaggttacattgtaaaaagcttattttttcacatatatattattttaacaggtacaacaattgtctttttttgcaatcttcttcgttattacctttattcgtgtaattaactaactccgtataccatactttacttaaaaaaatcctatacataatcgtttcaatagcattttttataattctaaatgcgtatttgtaaacttcttacatcgaaaaaggaatacctcttttttcgaggtatcccttaaacataagaattagtttgttgtatctccacactctatatcaactactactgaaacattaatatagtttttaatctctttatttcgggttttatcgccctcacttgtaaatacgatatgcttgaaaaagtgcctaaaattaaggatttctacatagttcgtctttgtagcaacacacaagtctccacgtgcggtgtcgtttttcactgctttaacagtacgcgaacccgcatagttactgagtttttacaccctttgacaggttgctaatatctgcaatcataaggttaagacatggcgtacagaccgtttgactttgcaaacgtgtggcgggtacgccgatattttgtaacacttttataatacaaaatttttcataaattttatatctaatttgcgattatccgcataaacactatactttcaagcactttgaagcatagaaaattatttaatttaccacgaatttaccacaattgaatgagccttgatatgacaataaaatagcactaaaaagacaccctttacacctgagtggtgtcttttgttaaaaagcagtcaatcctaagactaactgctttgtgtgtatggatataaagttgtcaaactgggattgtatgttggaaattattctacatcaatcacatcatcttcacctatttctatgaaagtggtgctactatctgttgaaacgtttttagatactgacatattaaatattatcaagaggatattcaatagcacaattactaggaatataaccccagcaattttccaaatttttttgctacgcctattcttaattgccatctgttcactgatttttgcaagttgttctgcgatgacatcattatcatcttcatcaggtattgttcctccaagcaatacaaattaacattatagttgcattactcttatattgatgtaaaacttaatattctattgttcccaatatcacatagaaccgaatttactaccactatcttatttaaaaatgaaaatatcttctatcggtgcattgagaacccgtgaaatatcaatcgccagttttagagatggattgtattgtgctttttccaacctcataattgtttctctacgaaccccgactttttctgccagttgttcttgtgttaaaccttgtgctacacgatatacctttaagttgcacatgaaatcttctaccatgacttattctcctttttcgtagcggtataataaatagttgctaagaaaaatgactaaagcatagataagtgaaacagaaatgagcataaaaattgcacaccattccacattacgagaaaacattcctattgccataagccaaatgactataaagagaagtttaaatcctactttataggcgtttatttctgcttttcttttattttctaaaaaaagttcatcttctaaagtgtgagaaagttttccttcaaagaaaaagccgaaaaagccaaaaaatataaagaatacaaaaggatatattttcccatattcaaaataagtccaaaaaccgctaaaacctagaaatccaaatattccacacagtccccaatatgaagatactgttcttgaatagtttttgtctttaaaatttttagaaaaggcgtttttaaagaagataactgttacatataagacataaatagctatcaaagcaccgactatcaacattggtatatcctttatggaaaatacataattagacatatccatgtttttaacccagcgtgcgtcgttaaataataaagagtaaattatccctgcaatcagtaatattacacaccctactcccataaagataacttgtttcatttgtttttttgtcataatcatccctcttttcaatgtgatgtttttgtatctttataagacaaatatatcacttaatataaatggtgtcaacaagaaaatgatacaaatacatctcatatcgtttttatataatttactacaaatcagattttgtccctttcttcctcttgtctgccacaaacagtaaaggaaaagccctgtcaagagccttgccaccattggtggtgctttgcactctttactgggctttttgtttgctgtatcttctacaaagaggaaaagggttactcgtcctcatcatcaaaatcgttatttttcaatacttcccgtaataattccatatcttcttttgaattggggtttatcatttttacgacttgataaggtgtcctatatttatgtccctctatgctttcaccgaacatatccatgctgtataaatcatcatagtggtctaacagtttttgaaacttcaaatgctggataaattctttgattggataaaggtcggacgctacaatgctttttccgttgatgtagtcggtaatatattcccgtaactttttcaactcatattccagccattcttcttcgctgtcaaagaagttgtcataatgcccatgttttaattctgcatttagtcgttcttcaattcttaaaaactggcagacttccttttcggcttgattaacatacttccattctcccgacagtaattcatttggggttacacccagcacgtccattatcttttctaatgtatcaaaggtaggataatttacaccccgttcaatcttggaaaggctctgcatattgataccgattttgtccgcaagttcctgttgtttcattcctctgtgctttcttatggtctgtatattttctcctaagaaactgattttcttttcgtaatgctccataactcagtataaacactcctttcattgcttttattggtatttataagcatatcatacttaatatatatcaaaaagtcaacaaaaacttcttgacaagtaattctgatagcgttattatcgtatcagatagagtgattaagcacgctagggtcaatcacacgcttgagtaagcatagaaaagatgtattttcattttgatagaatgaataaacgtggactatcagacagaaaatagtggtttccaaaaggggctggctggacggggcacgtcccccagacgtgtttcggacagacagttccttttggaaagggaacgcctttaggcgttcataaagggcgtatatgtaacaccgccctgcgcatacatgtcatagtacctagaaactgtgataaataaaggaaaaaacacgatttttactccgcaaaaaaacgggaagtacgaaaggagaaatgcactataactacacacaaaaatttatccgttaagattgattacatcagcattgtatttgatactgcaaccgctgaagatgtaatcatgcacattttaggtttaccgactgatattttcaatgtctatccggcaagcattaaatacaaaacctatcaagcacgctggcagattggagatatttatgtatcgggggacgcaagaaaaacagaggataacccacaagggttaggctgttatcttgttatgactggcagagggtgtgatgatattttccgtattctcgacagtaggaattatacctttggtgatatgttccgacgctgtgagcgaagatacggactggataacttccatttcacaagacttgatattgccattgatgataagaacgaaaagccattctttaccatagagcagataaagaagaaatgcgaaaaagaggaatttatttctaatagtgagggctaccactttgacgaaagcaagtttgatgatttcgacaccgcaaagactgtttatatcggtgctggaaaatcgggattgtcctatcgcttttatgataaggataaggaagtctgttcaaaacataataagacgcttgaggaagtcggcagttggaaacggacagaaatgcaactgcgtgatgataaggctcatgcttttgccatgacattcaatgacagaccgctggaacttggagaactggctttcgggctattggcaaacaacctacgctttgtcgtaccaaacagaaacgaaagtaataagagcaggtggaaaacttgtcggttttgggaacgctttttaggggctgtggaagtcttaaaactgcaagtaccaaaacagcaaaattcccttgaagaaacacagcaatggctcacagagggtggcgtgatttccgctgtcaaaagtttttacttcttggaagaacatgacgcattaggtggactggaaaaagtgggaactatgcttgataaggcaagatacagcaattccctttccagtaaattaaccgctcatttacagaggataaaccgcaccgaccttattccctatatccagtatgacacgaaacatgggaaagggggtatctgatgaataacaacgatattcctgtatgggaaaaatacacccttaccattgaagaagcgtcaaggtatttccgtatcggagaaaacaagttaagacgattggcagaggaaaacaaggacgctggctggttcattatgaatggcaaccgcatacagattaaacgccgacaatttgaacaggtcattgacaaattgaacgcaatctaatgcaaatgagccttgtatgtgttatgatgaacacaagtcatatcaaggctctttccaacaaggaaaggagcagacaccatgaaagaaaaaagacgggataacaaaggtcgtatcctgcatactggagagagccaacgaacagacgggaaatacttatataaatatgtagacgcatttggaaacacaaaatatgtgtatgcttggagattgacacccacagacccgacaccaaagggaaaacgggaaaaaccctcacttcgagaactggaacagcagataagacgagatgttgaggacggtatcgacagcacaggcaagaaaatgacgctttgccaactttatgccaaacagaacgcacaaagggcaaatgtgaagaaaagcacacagaaacaacgggaacaactcatgcggttattgaaagaggacaagttaggtgctaggagtattgatacaatcaagccctctgacgctaaagaatgggcgttacgcatgaaagacaaaggcttttcctacaataccattaacaaccataaacgctcgttaaaagcgtcattctatatcgccatacaagacgattgcgtaaggaaaaatccctttgatttcaagttaagtgaagtcctagaaaatgataccaaagagaaagtcgcattgacagaggaacaggaacaagccttactctcatttatcaagacagacaatgtgtatcacaagcattatgatgatgtgctgatactgttaaagactggacttcgtatctcggaactgtgcggactgacagtagctgatattgatttcaagaatgaagttgtaattatcgaccaccagttactaaagagcaaggaacagggctattatattgaaacgcctaagacgaaaagcggaataagacaagtgccattaagtagagaaacaatacaggcatttcaacgagttatgaagaaacgcccaaaggcagaaccatttgtgatagacggacggggcaactttctatttgtcaatcataaaggcaagcccaaagttgcgattgattacaacgccttatttgtccgtatggtaaagaaatataacaagcaccacaaggacaatcccttgccacatatcacaccgcatacgctacgccatacattctgcacaagactggcaagcaagaacatgaacccaaaagatttacagtatatcatgggacattcaaacattagtatcacaatgaactggtacgctcatgcgtccatagataccgcaaaatcagaggttcagcgtctaatcgcatagaagtatttaccacgattttaaccacgattgacagggaaaatataagaaaatagacctagatatgtgaggtttaccacaaaagcaaaatgcccgtagagccgataaaataaggctttgcggacatttaggaagatataaaaagatagtcaaaaagacatatataatttattctaaatactgctaccaaatttggtaatatatcagtacgccgatttgttttggacatttttgcgaatggcattaacaccctttcaatgttcacttttattgaaaccgatattttccttttccatgtcctgttacaggtacgattacctcactatcaaccaacagttttattaacttggaagctcctgatggctttaatccagtaatttcttcaactatcgttcttccgaaacaattttcttttccacattttgaaaatatttctactgtatgatttattgttttttctgaaatcgtatctgagaaagaaagtaatttatttcgaatgtccacttttgtgctttcaatgtccacttttactctttcaatgtccacttctgcaaaccttccactaatgtgcatcgtacgattatgaagttcattcttctcatccaacaataaatttcttaaaaacaattccaaatactcggttgtttcatgaacaccatttttcaaatcgttataattggccctaacaagtgcatttctaaaataccatgcattctccgcaaaaatatcgttagttgcatcaaatccaagtgttctaagatacttaataaaaaatactgccgtagttcgtgtatttccttctccgaatacatgtatctgccataatcttgatacaaaaaacgccaggtggtgaataatttcttccatgctcaagtttttataactaaacttcttttcctctgcaaaatcatagtccagggttgcacgaagttctgatgcacttccataaagaatcgttgctccattcagcacccactctttttttgtgatattataatctctaagttttccggcatgtccataaatccctgtaaataactttttatgaatagagatatactcattcggagtaaaactaaatgctttctccgacaaaatttttgctattctaacggcaactttgtcggcctcttccgtacggtcttctatatctgcttttggattttcttcataatacgtgttgagaagttcttgcgcttcatcaatcgaaatatcaccttcaatattctttattgcagtatcaatcaaatacttcgaagtctttaatccatccactgcttgaagtccgatagctgtatgccaggcataacctttgtctcttttattcggttctgattgtttcatatactctttaaagggatctttatccatcaaattgcctccattcatttttaccaataccagctctttctgatactgtcttgtaaagatttttccttttcttcagcatttttttcgtgctgacgttttcccagatattcatcctcagtcgctatagacggatcataccagtcagctttcttccgggcccattcaatccacgctggagtaatatcttcatttccactatctatcatagcctgaatatattctcttatttcctttgcaattctatagtcttcagctttatttacaagttcttttacaagacgaatttcttgttcttttctttgtctattttcttctctgcgtctcgcttcttcaactctcttacgttctgcctcttcacgtgcttctcgtacaattctattctcttctgccttctcatacagggtaaccaaaatatcacccagtctatcttctaatttttcagaatcgttatctctaatgtagcttcgctccccaaacacaatacgaagtttaccattatataccttgtcatactttcttatttgcggttttgaagcccatctatgatttttgatatcatcattatactttacgagcgcctgtgcctcttgcttagtcatttcatgcttcacctgatcttgactctcaaccatacgaaatctaacaatatcacctctaattctcacagacaaatcactattaatacttccacctaaagattcaattgatttgaatacggtatctaatatagcaattgcacgtgacatacactcatcagacatttccttaaagaatgcaggttcgttttctggtttattatgtcttggattatagtatggtctactctgtgcttctttcagttttgacttataatctgcaatatccttcttgtattggaccaacattttatgcaatcgtgtactttgacttatctgcagattgcacgcatattctaatactttatttctttctgtcgcatccaaataatcaagaattccatccggccacttaggtatattctccgtttttttctgcgataaatcttcctcgactgctacgtccaattcttctgttacatcagtatgcactttctctactacttctgccttagctttccgaatacgcttaacaaccgcgtctttcgttattaatgaaatttctgtatcttccaatccagaaaattctacaatctcattcgatacatcttttcccatattcttcttagtccaataaccagaagaaggaaaagatatattttctactttacaagttgctatcagtttaccataattcaagttatattttctggctacccctgcaactgaaagagcccatatttcatcatagagctgcttacgagtcaatttaactattcctttttcattctccatcctggcagctcctttcctgcatattttttgtcaacatctttgtattttcccagcgaaaacgcatattcataaagctctaattctgctgatcctcgttttcgcttaatagaaaaaccaaatcttttttcatttcttcaaactgttctattatagtatttagactcttttctatattttgaacttgtacttctgatgttttcccatatttatatgcaatcaatctctcaccaattatgtgataggaccaactctcagaatatgttctatctctttcttcattgtgaattgcaaaaccgatcggtaaaagatcatttctcatgccgatactaaccgccataggggatatgcctaggtaatctgccgctatcttacatgttattttactcatatttctaatatcttcatctgtgtatttaggcataatttatctcctttaataaaaatatttttccgccctgaacaagaaaaactttttaagctataagtaagtcgccttaatctaaaaaatcaaactgagatgcttttgatgcagttttgaacccatcatttctatcatgctttccttcttcgtttatttctgttaatatatctttaattttacttaagccacttatcttaaattgaattcttatagcagttccatcaatactattaggcagatattcatttcgagtcactatatcccaaccggcatttcttaattgcttatcaatttttacacgagctttttcttccggtaacataggcatactcttcctttctaatccattctcccatatctgttgtcccaaaatcaggacttgatatacttcccggacttaattcttttatccgctggttttacagcattctttggaatagcccaagtattaccaaacttcatagccccttctatcattccttcattgcagattgtctgcactcttctaactgataggttccacttttctgctgcttctttaatagtcataaactccatattttcttacctcaataaagttataaaatgcgacattttatcctaatttctattataagcgccaagacgccgaaaatcaatctaaacctacataactttcggcgtacagtctattacttctccgcgtacaaaatcccataaaaataacctttcagcgtactctatacgaactacgccaaaaggttgattttcactacacccgtattctatttttcatttcatgcacatattttataggcttattttcataatatgttctagcagatatacccctcacccccgcttaaactaggcatttcttagagaggaggcataccgtctccacatgataagttcccgggaacaaatccaccccgctgatcttctccactttatatccacgtccctgtatcatctccagatcccgtgccagactggtcggtttgcatgcgatatacaccagacgctccactccgaaattcaggatcttcataagtgccttcggattcacgccgtctctcggtggatcgagcatgatcagatccggaacttcgcccagttcatcaatgactttcaatacatcgcctgcccagaatgtacaattgtccagattatttaacttcgcattttcttttgctgcctctaccgcttcttctacaatctccacaccaaccactttcttcgcaaccggtgcgaggatctgtgcgattgttcccgttccgctgtacagatcaaagacaactttttcattcgtatctccgatgtattctctggctgtctcatacaagacttccgctcccagcgaattagtctggaagaatgagaatggtgtgatcttgaattttaatccaagtaattcctcgtagaaataatcctgtccgaacaggacttctgttccttcgtcttttacgacatctgcaaggctgtcgttctttgtatgcaggattccgaccaatgttccatcaaagttcattgctgtcatcttttccagccatgcctccttgaatgtctggatttttttcattgcctctgccggatcaactccgagttctgccgtatcggatgctgtgaccagatccaccaggatttctcctgtctttactgcttttcttaccagcaggtggcggaaatatccgacatgacgcatgcggtgataatatggaaggcctgattctctggcacattccagtgtacatgcaagaattttcctgtaatcttcatctacgatctgacaatccgttacattaacaatatcatgaaaacttcctcttttgtgcataccaagtgccagcggtccgtctttgtattcatctccgaatgagaattccatcttgttacggtattcggatctgaccggacttggtttgatgccttcccagatatattcaccatttaccgcttcatccatcatctttttcacctgctcatttttcatcgcaagctgctcctcatatggaagattctggtacgtacaccctccgcactgaccgaaatgtggacaggctgacgggatctcgcttgctgacggttccaccacttctaaaaggcgtccctctgcctttcctttccggatcttattcacagaaaatcttactttctgtcccggcacgccgttctttacgactacccatctgtcttcttccggcacgtatatgcgccctttatttggaaattccacggattctataattccttcgtatacctgtccttttttcatatatatcctttctgctgtaactctttttctattctcttatttcaaatcatctactgttccggtattctataaaagcttccatattatcctttatacacggccttcagtatcgttccttcctgctctacccgtacatgtttcagactcttcacatactggttaaactgggaatatccataatcgcgaattttaaaatctttgtatttctcatacattttattaccaagtgtactgagttctactcctgcttttccggctttttttacgatctgcacaacatagctgtcgatattttccttcagatcctgatcttctcttaaagtaacagacacaatgttgccatgctttaccatctgtatccttgtaaattcttccaggaatttggacaacatattatatccgtaactacgtacatcaaaatccggatacagacttaccaatcggcttccgacttcgcccagtccagtcggcttgttaatatcctggttttcaatgatcatcttgatgatcgcatcttcaatcttctccttgctacgtttgtcatgtgatgtctcattctttgtggttccaggattctgttcactcatcagattttctaagattgtaaatttatcacacgcttttcgaaatggctccggcgtcttattctctcccataccgatgaccatctttccactttctcttaatctgcttaccagccttgtaaaatcgctgtcactggatacaatacagaaaccgtcgacatcattggtatacaaaatatccattgcgtcaatgatcatagccgaatcagttgagttcttcccctgtgtatagctaaactgctggatcggcgtgattgaattcgttaaaagttcatccttccagctcgaatgctgcgtgctggtccagtctccatatattcttttgtatgtaataatcccgtattttgacaactctgtcaatattggtttgatgtattttgctgatacattatccgcatcgatcagcagtgcataacactgttcttccattctttccctcccgttacttattcatatatctatataaccttgccttttattttatatgttcatagatttatatcttcggattgtattggattgcactcgagaccgcaagagaaaagcaggccagtcgcctttcttatatcagatcggtttctaacctgcttctttcttcacttattcattcgcccggttcttatacctgatcgtcatcatcgaaaaagtcatcgtcgaaatcatcatcatcgaaatcgtcttcgaaatcttccagataatccggggtgaagaaacaatatactgcataagcgattcctgcaactgcagctacagctccaactaatgccaggatccagagtacggtcttgccgtgtttgtcctcttcttttttattcatcagttcgctaagcttggatgctgcaataatatcttctactttactcatgcttccacgtcctttcctctgctcttttggcaaatcaattctgcgtttattatatcactttacatgatgtattactacttattttttttagatttttattctgaaatctatacacatttttctaattgtatgtaatattttatctgatttctacactttctgaagtctggcaaatgctgcaaacatctttttcgttcccggtccgtcaaaatcaacggtgacttcataatctcttccgccttccgtgatcgcagtcacggttccttctccgaatttgatatgtttcacacggtccccgactccgtaaggaagctttccgcccttcggtgtaccgaactgctgtaccggcttcggtgcggtaaatgctttggtcttgaaagcttcttttgcctgcatgaaagaagtcttcactcttaccggttcgctttcttctttcttctctttctttgtggacggtcctgtttccagaagttctaacggaatctcttttaagaaacgggacattttcttatactgcgtctcgccatgcaccatacgttttcttgcgcaggtcagagtcagatctttctcagctcttgtgattcccacatagcagagacgtctttcttcttccagttctgccggatcgtcggctgtgatcgtcatgtagcttgggaacagaccatcttccatccctgccagatatacatgtgggaattccagacctttcgcactgtgcagtgtcatcagtactacataatccgtactttcgtccagactgtcgatatctgccaccaacgctacatcttcaaggaaaccgctgagtgtcgatgcctcattctgtgtctcacagttttcttcgtaagctgcaatcttgttacggagctcgtctatgttttcgattcttgatgttgcttcttcactttcacattcatggatcagcgcatcgatatagccagtttctttgatgacttcttccatcagttcggatacactcatatcctgtacatcatttttgaaatgctcaatcatcgcaacaaatgattccagttttgcctgtcctcttccgatgttcgggatcagatctacagcccggagtgcgtcatagaaactgcattctctggatgatgcatattcctgcacacggttgatacttgtcagtccgataccgcgttttggaacatttacaattcgtctgacagccagatcgtctcttccgttatcaattgtcttaagatacgcaagaagatctttgatctcacgtctcgcatagaagttcacgccgccgatgactttatatggaatactgtcacggacgaaacgttcctcgaacatacgggactgtgcattggtacgataaagtactgcattatctttgtaactgcagagttctttattgacatgacgtctgatgtccccgactacatattctgcttcttcataagcagaatcgaactggcggaactggatcatatttccatcttcgttctctgtccagagagttttttcttttcttccatgattgttccggatcacggcattggcagcattcaggatattgccggtagaacggtaattctgttccagtttgatcaccttggtatcatcaaatacatgttcaaaatccaggatgttcttaatgttcgcaccgcggaatttataaatggactggtcatcgtcgccaaccacgcacaggttacggtacttggatgccagcagatggatcagttcgaactgtactgtattcgtatcctgatactcgtctaccataatataacggaaacgctcctgataatattccagtacatctttctgcgtctggaaaagctgcaccgtcttaaacaacagatcgtcaaaatctaacgcattatttgaacggagctgtttttcatattcttcatatacttctgcaatttttttccggctgtaatccccttctgcacgcattctgtattcctgcggtgtcaccagttcatcctttgctttggaaatctctgacagcagtgctctttcccggaacatcttcgtatcaacctgcagaagcttgcagacttcacgcatcagtgtcttctgatcatcactgtcgtaaatcgtgaagttggtatcgtatccaagcagatcaatatggcgtcttaagatacgcacacacatggaatggaaggtacttacccagatgctttcggaaccgtagccgactaatttatcgacacgttccctcatctctcctgctgccttattcgtaaatgtgatcgccaggatattccatggattcacctgctgctcttcgatcagataagcaatcctgtgcgtcagcactctggtcttcccggatcccgcaccagcaaggatcagaagtggtccttcggtatggaatacggcttctctttgttgttcatttaatgtatcgtatatactcaatcttatagtttcctttctttccggttttctattcttcttttttctttccggcctgttctgctttcgtcatggattcatgttctctttttacttctttataaagagccgttgatgtccagttctggttctttgcagtaacgattgcctttagcggaatctgtactttttcttttctcatctggaataataacttatccagtgtctgattgtctgccagcagcatgacaatcatctcttcttcaaaatctgtcatttcttcattttttgcattgtctgtcccggaagtttcttccacagatgcttcttccgccacttcttctttcagtccggtcagtactccgattgttttagaatactcttctttttctacatattttacacgaaatccgagaaagctccccaacatcccgatctttctgccttttttcgtgcctttcagattataacataacatgattgatctcatatgcattctacctcttttcgaatgtctgtttccattatagtgattttaggtgtgttctgcaaggcacattttaaatccttacgaatacatgacactacagaaaacctgcccctggcagctctttatgaacgcatggcgataaaaagcttccttccggatcataagatttttcttattttcccaaaggaagctcttttatttttctttatttttttatgttcttatgcgctgatcgcatttcccgtatacagctgataatatctgcctttctcttcgatcagctcatcatgtgtacctcgctcgatgattcttccctgctccagtaccataatgcagtcggaattgcggaccgttgataatcggtgggcaatgacaaatgttgttcttccgtgcatcagcttatccataccatcctgtacgatccgttctgttctggtgtcgatggaactggtcgcttcatcgaggatcagtaccggcggatcggcgatggctgctctcgcaatggcaagaagctggcgctgtccctggcttaagttcgctccgtctccggtcagcatcgtatcataaccatccggaagccggcggataaagctgtcggcattggcaagctttgctgctgccacgatctcttcatcggtcgcatccagtttgccaaagcggatattgtcacgcaccgttccggtgaataaatgtgtatcctgcagaacgattccaagtgaacgcctgagatctgctttcttgatcttattaatattaattccatcatagcgaatcttaccgtcctgaatatcgtagaaacggttgatcagattggtaatcgtcgtcttacctgcaccggtcgagccgacgaaagcaatcttctgtcccggtttcgcatacaatttgataccatgcaatacaattttctcatcattatagccgaaatccacgccattgaatacaacttcacctttgacttccacataatccacactgccatcattctgatgtgtatgtttccatgcccagcgctcggttctttcttcacactctgtgagctttccgtcttcttctttcgcattgaccagtgttacatagccttcatccagctcttctttttcatccatcagacggaagatacgatcagccccggccattgccataacgattgcattcatctgcatactgatctgattgatcggcatactgaagctcttattaaatgtcaggaaactcgccagtcctccaagcgtaaatcctccgacttttccaagtgccagcacacctccgacgatcgcacagattacataactgatatttccaatctgtgcattgatcggtcctaagaagttggcaaatgtattcgctctgtctgcgctgatatataactcatcattcagtttcttgaaattctgcatattctcttcttcatgacagaacacctttacgaccttctgcccgttcatcatctcttcgatgtaaccgttcacagttcccaggtctttctgctgttttgcaaaatatgccccgctctgtcctgcagatttcttcgaacagaataccatgattccgaccatgaccatcgttacgatagtaagcgggatgcttaagatcaacatactgataaatacactgacgatcgtaatcccactgtttaagagctgtggcatactctggctgatcatctgtctcaatgtatcgatatcattcgtatataccgacatgatgtcaccatgtgcatgggtatcaaagtatttgatcggcagcttttccatatgtgaaaacagatcatttcttaagttacggagtgttccctgtgtcacatttaccatcagacggttataaccgaacgttgcaagtacacccagcgcataaaatgctgctactttggcgatcgcatgtgcaagcggtgtaaagttcggattatccgataataaaaatggtgtaatatattcgtcgatcaggttcttcatgaacatcgttccctgcacattacaaagtacgctgacaacgatcagtactacgacactgatgcagtggaatttatagtctttcaatacatatttcataaggcggaggaataattcacccggattttttacctgtgatttcattcctctcggctgtcttcccggtcccggcatcttatttctcctccttctcgtcaaaatcgccgccaccgctggtctgtgattcatagacttcacggtagatatcattctgttccagtaattcttcatgtgtaccgaatccattgaccttaccgtcttccataacgatgatacggtccgcatcctgtacactggagattctctgtgcaatgatcagtttcgtcgtatccggaatctcttcacggaatgctctccggatcttcgcatccgttgcggtatctaccgcactggtactgtcatccaggatcagtactttgggcttcttaagtaatgctcttgcgatacaaagtctctgcttctgacctccggatacattgcttccgccctgctcgatataggtctcatatcctttcaggaaacggtcgatgaactcatccgcacatgcaagttcacacgcgtgtctgcattcttccagagttgcctccttgtctccccagcggagattatcaaggattgttcctgaaaacagcacgttattctgtaagactactgatacctgattacgaagcacttccatatcatagtctttgacatttttgccaccaaccagtacttcgcctttcgtcacatcgtaaagacggctgatcaggttaaccagactcgtcttggcacttccggttcctccgatgattccgatcgtctcaccggaacggatcttcagatcaatatcttccagtaccggttcgtcactgtcctttttatacgcaaagtccacatgacggaattcaatacttccgtcttccactttcatgaacggatgttccggattcttaagatcactcgtctcatttaacacttcggagatacgtttcgcacttgccatactcatcgtgatcataacgaataccatggaaagcatcatcaggctcatcaggatattcatacaatatgtaagaagactcatcagttctcctgtcgtcagggaattacttgcgatcatctttgctccgaaccagctcactaacaggatacacgtgtataccgctgtctgcatcatcggggcattgaataccaggtttgtctctgcttttacaaaaatgttatagatattctcacttgctcttcttaacttggatgtctcctgttcctctcttacatatgcctttacgacacggatcgcagatacattttcctgtacagactcattcaggtcatcgtactttggaaatgcctgctggaaatattttgtcgcatggctcatgatcaggaataataatattccaagaataataaccgctacaagatagatgcatgcaagtcttgcattgatcgtaaatgccatgaccatcgcacagatcatacttgccggtgctctggtgaacatacgcagaatcatctggtatgcattctgtatattggttacatctgttgtcattctggttacaagtcccgccgtgctgaatttatcaatattcgcaaatgaaaatgtctgaatattgttaaacatcgcctctcgtaagtttcttgcaaatcctgccgatgcttttgcaccgtatcttccgcccatcattccggcgaataatccgatggccgctgcaacgaccatgatcccgccgaccttgtaaatatgctggatgtccccggcattgacacctttatcgatgatcgatgccatcagaaacgggatgatcatctccatcaatacttcaaggatcataaagagcggagttgcaatggatgctgctttgaattctttgatctgttttgctaatgtcttaatcattccatttacgccctttctgtttcatttattgttttatagttacatttataactccgattttccggattacctgacttcatatttcttcacattctgattgatccggtctaataccttataaaaaatatgaagttcttcttctgatattccttcggaaagctcttcttcgatatgctccacaatatcttcaaaagattcctggcttgcaatccctttttctgtcaggattactttttttaacctggcatcctgttttaccgattctctttttacgaatcccttcttttccattaattggatcagattcgtaaccgtagatctccctactgcaaatctttgttcaatatccttctgaaaaatatcctgctcccggttctcatacagataccgtatgatccagccatgcatcatcgtcacttcatccactccggattttctgacatgtgctgacagatttcttgacagtttcagatccgtacaatgaatttccgggccaatctttctgtcttcttctttcacattaccatcctttctctatttttcaaaaaatgtttgctttcgaattgttcgttatcaaattgtttgctttcaaacatattttatcatcatacttaagaatgtcaacactttccacaaatttcagaaaattttttcaacatttttccctttctgtattcaaaaaaatgcttgctatctagttttcaaaactatataataattacattgaggtgataagaatgacaatagacacaaaagatatgctaaacagcattttatcaagcatctcacgaattgattacgtgaggccggatgacattccgaatatagatttgtacatggatcaggttactacctttatggaaaaagaactggcatccagtaaacgccacgaagatgataagattcttaccaagacaatgatcaataattacgccaagaataatcttcttccaccaccggtgaagaaaaagtattccaaagaacatttactggtaatgatctttatctattattttaaaaattttctttctattaaagatattgaaaccatgttaacacctattacagataaatacttcgataccgacaaagattttgatatcacttctatttataaagaagtatgtgaactggaaaaatcacggattccggaattcgaaaaagaaatcatccgttcctataatacttcaaaaaaaagctttgtcgaggtcccggaagatgacagagattctcttcagttatttgcattcatctgtaatctgagttttgatatttacgtaaaaaaacagattgtcgaaaaattattggataatttccccgatctgcttcattccgaaaagaaaaattcaaataagaaagatttaaataaagacacgaaaaaaaagaaatagggcacaaagtcctatttctttttttcacgtcttattctgctttttcttctttggcttccccaagtccaattctttcaaagaccatatcatatccgtcatttccataattcaaggaacgattcacacgactgatcgttgctgtagaagcacctgtcttctctgcaatctcaagataggttttgtgttctcttaacatctttgcaacttcaaatcgctgtgataatgaaagtaattcattaatcgtacagatatcttcaaaaaatgtataacactcctctttatcttcgaggcttaaaattccttgaaacagatagtcaactgcctctgttctgattttcttactcatagcattatctccttttgtagcagattcattactgttacattttaacacactaaattcataaaatctatagctttttgccatattttatacaagctttcaatttttccagtgaaagattggcaatcagttcctccggaaaatttgctttcttcaagatttcttccgcgtatggatattctgcaatatctgcatccacatgagaatcacttccgagtacgatcattactccctgttctttacactcctttaccattctcagacaattctctttcgtattctccctaaagccctccggacgcagtgacgaattatttacttccagtaacgttcctgtcttttttgctttacttaccagacgtttcatatctacaggaaatcttccgtcatccggatgtccaatgatgtcaacatatggattttccataacattctcatatgcggcagtcacattctctacagttctttcatctctgaaacatggaatatgaatacttgcaattgcgatatcaagtgtcttaagtacatcttcagaaagatccactttaccctccgcattcataatattcagttcggttcctaataaaagttcaattccaaatctctttctcggaacaatccttaaattctgaaaatagtataaatgacaggtccctggcatctccggtgcatgttccgtaatcgcaaggccttttaatcccttatctgccgctgcttttgccatttagtaccataaaagtgtagttgttagagaggaattaactctaacatctacacttattttattataataaggggagactgtaattaattctgtgtaaactctaaaagagctatatatcctcttggattgatgttaaaataaatatcaattcaggaggatttttttatggcacgaagaagaaaaatggatccagaacgcaaagcgttcatcaacagcttgttggaacactatcaaccaaaggatgctcaggatatccaggacatgctgaaagacctgttaggcgaaacgttgcaaggtatgttagaagctgaaatggggagcaggtaagacaactatttctgattacttaagcacgatgttcgatatggatattgtagagatggatcaggtgattgcagaacgtgaagagatgagtatttcggatatctttgctacatatggcgaagagtacttccgtgatctggagacaaatcttctgattgagatgcagtcacataagaatgcagttatctcatgtggtggtggcgcagccttaagagagagaaatgtggcagagatgaagaagaacggaagagtggttcttcttaccgctacaccggagaccatttacgaacgtgtcaaagacagtaatgacagaccggtattaaatggaagaaagaatgtcaaaggcatttcagaacttatggaacagcgtcgtgagaaatatgaagcggcagcagatatcgtaatcaatacagatgataagacagtccttcagatttgtgaggaactggttcagcgtctgcaggagtcagaagaatagtatgtttgataaattttttccggatcgctatgtggcatctacttatgtgattgattttgaaggattatataaagaaggtgtacgtggactgatctttgatattgataatacattagttccgcacggagcaccggcagatgaaagggccagagctttgttcaaaagactgaagtcgattggctttcggtgctgtctgatctccaataatcagaaaccgagagtggagatgttcaacaaagatatccaggtggattatgtctataatgcgcataaaccatccatcagaaattatttaaaggcgatggagatcatgggaacggacagagacagtacggtatttatcggagaccagctttttaccgatgtgtggggagcaaaacgtgccgggatcccgaatattctggtaaaaccgatacatccgaaggaggaaatccagattgttttaaaacgctatctggaaaaaatcgtgctgcatttttataagaagagtttacagtgcgaaaaaaaggttgaaaaataatatcatgtattatagaataatatgagatgaaattacgtaagcgtgtatacgcgatttaaggaggataaggtaatggctaaagtttcagcaggagacatccgtaatggtgtaacaatcgaagttgacggaaaagtatgtcaggttatcgatttcatgcatgtaaaacctggtaaaggtgcagcattcgtgcgtgttaaaatgaaaaatattatcgatggtggtgtggtagagacaacattccgtccaacagagacatttgaacaggctcatatcgagagaaagaaaatgcagtatctgtataacgatggtgagttctacaactacatggacaatgagacatttgaacagatcatgatcagcgcagaggatgcagcagattctatgaaatttgtaaaagagaatgaagaagtaacaatcagcttctatcagggaaatgcgttcgcgatcgatccaccgctcagcgtagaattagttgtaacagagacagagccaggtgtaaaaggtaacacagctacaggtgctacaaaaccggctatcgttgagactggcgctaaggttaacgttccactgttcgttgatcagggcgagacaatcaagattgatacccgtacaggagcatatctttcaagagcataaaatttgttttatgatttttataaaaagccttgcattttttgcagggcttttttataatctaaataccataatatttcttaaataattctatttatttcgggcggttgaatcactgcatatttcagacaacagtttttgaatattgctggataggaaggagttctatgacatattatcagtttatccacgcagtagaagaaaaaataaagaaagaggtgaaagaagaaagaaaaataagcgttcatacgaatataaaaaataatggtgtgaaacggacaggaattatgatttctgagaatggtattaatatatcaccgacaatatatctggaagaatattttcaacaattcaaaagaggctatccgctggaattgatagtgaaagatatcttatcgttgtatgaaaaaatacgtttccagaattcctggaaagaaggtgaaaaagtaaaaagttatgatttcgtgaaaggaagaatcatatatcgtctggttaaccgggaacggaatcggaagcttcttgaggatgtcccgtataaggaatatcttgatcttgccatcgtgtattatgtgctgctggagatggatgaatatggaatggcctctatgctggtgagaagagaacatcttaagatgtggaaggtatcggaggaggatatttattatcgggcatgcaagaatacacagaaattattaccatatgatttttcgacaatgcgttctgtgatcatggaacttctggaaattggaagagaaatagaagaacagacggggaaaatgtatattctaagtaatgttatgagaagttacggagcatgtgcgatgatgtatccggatctgcttagaaaaattggcgaagaattggaagaaaactattatatacttccaagcagcgtacatgagacgatcatcgtggcagaaagcgaagctcctgggaaggaagaattgtgtgagatgattgaagaaatcaatgagacgcaggtagaagaggaagaagtgctttcgaacagagcatattattatgaatgtgatacgggaaaactgctcttttaagtaagaaaagtagaaaaagtgaaggaaatgcgagaaaagtcgaaagcatttcctttactttagttcaaagatgtgttaatatgactaaggcaatttcatatggtaattgtatacgcacccgtagctcaggggatagagcaccgccctccggaggcgggagcggcggttcgaatccgcccgggtgtgtactttttttactattttctatcgccatgtgttcataatgaactgtcggtggcgggtcttgtatggagggagtcttatgaaagcaaagattcatgaggttctgacaaggaagaacagatataaaagactggtatttattctggtgttgttttcgcttgttctacttgtaggaattctcggattcggactcactaaagagaaagaaaagaaagtacagaagacagaacaattcgtcagttcacagaaagtagttctggtaaacggtggctgcgaaaatatgcagacgaatccactgaaagaagagacggatgaacagatgataaaggcagtaaaagattactatacagaaaagaaggccgatacggaatttgtggagatgtatgatcattttaaaatctatacaaaatccggaaagtacaaagatacatatgtggcgttcgtcagatatgatatgaagatcaaagatatatatacagaggttcccggacttggaacattgtatgtcaaaaaggattctcagggaaattaccagataactcagcaagtaaagaaaaaagaaatccgggaatatattaaccggatcgcagaacatgaagacgtacaggctctgatgaatcagacgcaggagtcttatcagaaagcagttggttcagacgcacttttgaaggaggcgctggatgagctgaaggatgcatatgagaattccataggaaattagaaaactctggaaatatcagatatcataaaaggatgaatggaggagatacaaagtgaagaaaatcattgattatattgcagaagaacttgcggatgcatttgaaaaagcaggttatgacagagcttacggaaaagtaacattatcaaatcgtccggatctttgtgaataccagtgtaacggtgcaatggcgggagcaaaagcttataaaaaggcaccgttcatgatcgcagaggatgtagttgccctgttaaaggacagcgcatgtatggaagaggtagaggttgtaaagccgggatttatcaatatcagactgaaaaaagcatttgttgcagattatctgaaccagatggaagaagcagaagatcttggtattcagaaggcagagaaccctgagatgatcgttgtggattacggcggaccgaatgtggcaaaaccactgcatgtaggacatctgcgttctgcaattatcggggaaagcgttaaacgaattgcgagaaaaatgggacatgaggttcttggagatatccatcttggcgactggggatatcagatgggactgatcatcacagagttaaaagaaagaaaaccagagctgccatattttgatgaatcttttgaaggagaatatccaaaagaagcaccgtttactatcagcgagttggaagagatctatccaacagcaagtggtaaggcgaaagaagatgatgcttacagagagaatgcattacatgcaacatatctgttacagaatggacatagaggatatcgtgcaatctggaatcatattatcaatgtatctgtatctgatctgaaaagaaattatgcaaatctaaatgtaagttttgatctctggaagggagagtctgatgcacaggcatatattcctgacatgatcgataagttgaaaaaagacggatttgcgcatgaagatcagggggctctggttattgatgtgcaggaggagactgacacaaaagagatccctccatgtatgattcagaaatcagatggagcttcactgtatgggacaaccgatcttgctacactggtacagcgtgtcgaagattatcatccggataaggttatctatgttgttgataaacgtcaggaacttcattttacacaggtattccgttctgcgaaaaagacaggaatcgttccggcagagactgaattgaaattccttggatttggcactatgaatggaaaagatggtaagccgtttaagacaagagaaggcggagttatgcgcctggagacactgatttcggaaactgcggagaagatgtataagaaaatttctgaaaatcatgcgattgaagaagaagaagcaagaaagacagctaatatgatcggagtagctgcacttaaatacggagatctttcaaatcaggcatcaaaagattatgtttttgatgtggacagatttatttcatttgaaggtaatacaggtccgtatattctctatacgatcgttcgtattaaatcaatcctgcataaatatcaggcacagggaaacagcctggatggattaaaggtacaggaagcacatgcggactgcgagaaagcactgatgcttgaagcagctaaatataacgatgtgatcgcaaatgcgttccaggaccttgcaccgcataagatctgtgcatatatttatgatcttgcaaatgcatttaaccgtttctaccatgagacaaagattctgggtgaagaaaacgctgagaaacagaagagttatattgcacttctgaaagtaacaaaagatgtactggaaggatgtattgacgtacttggatttgaagcaccggaaaggatgtaagtaggatgacagagaaattattttatgaggacagtcacagaaccgaatttacagcaaaagtaatttcctgtgaagaagcaaaggatggctaccgtgtggtactggaccagacggtattcttcccggaaggcggcggtcagtatgcagatacaggagttctgggaaccgtgaacgttacagatgtgcatgaaaaagacgatgtgatctatcattatacgactgaaccattggaagtgggaagtattgtgaccggaaagatcaactgggaagaacgttttgaaaagatgcagcagcataccggggagcatattgtatccggtatcgtgcatgaaagatttggatataacaatgtcggttttcatctgggggccgattactgtacaatggattttgatggtacgatcagtaaagaacagttgaaagagattgaggcagcggcaaatgaggcagtatatcaggatcttgaaatcgagattctttatccgtcgaaggatgagctgaaagatatggattatcgcagcaagatcgagattgagggtcaggtacgtattgtaaagatcccaggttatgatgtgtgtgcatgctgtgcgccacatgtgaagacgaccggtgagatcggagctgtcaagctggtaagcatggccaattataaaggcggtgagcgtatcacaatgctctgcggaagacgtgcaatgcgggattatgagaaaaaagatgccatgacaaaagaaatctcggcactgttatgtgcaaaagaatatgaagtggcagatgcggttggtaagcttaaagatgagcagacacgtatgaagagccagatcgcagaattacagcagaaactcctggaatttcgtgtggcagagattccggtagaagagaagattgtgactgtattcgacagcgcattgtccggtaatcttccaagagaaatgatgaacaggctgcttgataaaggcgcagtgatctgtgcggtatttgccggaacagatacggacggttatcgatatgtaatcggaagcaggagtgaggatgtacgcccgatcagcaaagcattaaacgtcgcgtttgaaggacgcggtggtggaaagccggagatggttcagggatctgtgaagggaaccggtaaggctatgaaagaattgcttatgcagtataagtaatcgtgtgaatcataaagaaactaccagacaataaaatccgcagtgtagtatgtaacacaaatttgtttgcaggaacataaaaagatatttatgttacatactacactgcggattctgctttataaattgtcatgcactcgtaagaaacggctcagactatgcgcactattttctatgactttgaatgatcagacggacggttcgataaagaaatggcttgtacttttcgatagatacaggttcttcaaacagtatagaattgtatccggtggaaccagccaattccagaatagtgaatagcataatgtcaatatcctgatattcgtgttcatcggcttctaccagctccaggtatcgttcatagaagattttgtcaccttcgtcttcggcccagaaagcagattttaatgcacccattacaagattttttgaaataaagttcagcaaaggcttattatttactaaaatattaatgatgtcatcaatgataaaaatcagctggtcttcaagtccggtgatgccggagtgctccagagcaattgccgcatgatcaaataattctttggttttgtgagcgatcagcttatttttgatatcatacttatctttaaaatacagatagaaagttcctttcgctacacctgctttttcaacaatgtcagaaatggcggttgaattgatccctttggtggtaaataattcatatgcagtgcgaaagagtgcttcctttttcttttttttattttcctcgactcttcccatgagtaatcagacttccttttataactttttgtacaaattgcttagagtagttttgtacagatactgaaataaatatctcaacataataagtatagcaaatcagaaataagaagtcaaataaaattgactgttggtcatattttcttcgtattgcctttttaatagaataccgatataatagaaatgttaaatacgtatgaaaaaggagattatacatggaggcatatacaagttttgccgaggtttatgatacatttatggataatgtgccgtatgaagaatgggcggattatctggaagacagattaaaagaatacggagtaaaagacggactggttctggaactgggatgcgggaccggaagtatgacagaactcctggctgaaaaagggtatgatatgatcggagtagataattccgaagatatgctggagattgccatggagaaaaggattgagagtggccatgatatcctttatctgttgcagaatatgcaggagtttgaactgtacggaactgtgagagcaatagtcagtgtctgtgattgtgtcaattatgtgacagaaaagaatgaactgcaggaagtattccgtctggtcaataattatctggatccgcaaggtatttttatttttgattttaatacagaatataagtacagagaagtgctgggaaatcaggtaatcgcggaagacagggatgaatgcagttttatctgggaaaattattacaatcatacatcaatgatcaatgaatatgaactgactttatttgtacgtgaggatgaagaggcgtctctgtacagaaaatatcaggagagccatttccaaaaggcatatacattgcgggaaatgcgcggattgttagaaaaagcaggactgaaattcgttgcggcatatgatgcgtatacgaagaaagcaccgatgtatacaagcgaacggattacagtgatcgcaagagaatatggaaaatagacagaaataataaagaagggaatacacatatgaaagattatattgtaagagcaacagcagcggaagggcaggtaagagcctttgctgcgacaacaaaagaactggtagaaacggccagagaacatcataataccagcccggttgcgacagcggcactgggaagattactgacagcaggagcgatgatgggaagcatgatgaaaaatgagacagatatgctgacactgcaggtaagaggagacggaccgctcggtggtatcaccgttaccgcagacagtaaaggtgatgttaaaggatatgttaataatccggatgttatgctgccgccaaagaatggaaagcttgatgtgggaggtgctgttggaatcggtcttttacaggttataaaagacatgggattaaaggaaccatattccggacagacaattcttgtatccagtgagatagcagaagatctgacgtattattttgccaattcagaacaggtaccatcttcggtaggccttggtgtactgatggaaaaagataatacggtagaatgtgccggtggctttatcattcagatgatgccatttgccaaagaagagacaatcagtcagattgaagaaaatttaaaaaacataacatcagtaacagatcatctgaaaaaaggagaaacaccggagcagatcctggagattctgctgggaaatctgggcctggaaattacagacactatgccgacaaaattctattgtaactgttcaaaagaacgtgtagaaaaagccgtgatcagtgttggaaagaaagaaatccaggatatgatcgatgaagggaaggatatcgaagtaaaatgtcatttctgtaataccgcatacaaatatacggtagatgaactgaaagatatcttaaaacgttgtaaacgataaggagaaagagtcatgaaagacggatttgtaaaagcagcggctgcgactccggatatcagagtggcagatgttgcttataatacagaaaatatctgtaaaatgatcgacgagacagttgcaaacggagcaaaagtcattgtatttccggagttgtgtgtgacgggatatacctgtagtgatctttttatgcaggatatattactgaaagaggcaaaagaagctttatttaagattgcagattatacaaaagaaaaggatgcactcatatttataggtgtcccgcttgctgtagacggagaactttataatgttgcggctgcgttaaatcgtggaaatattctgggacttacgacaaagacatttcttccgaattatggggaattttatgagatgcgtcaattccgtccgggaccggatatggcaaggtggattacattagatggaaagaaaattccattcgggccacagctcctatttgtggcagaacagatggaggaactggtcgtttcggcagagatctgtgaagatgtgtggtctcctatcccgccaagtacacttgcagcaagagaaggtgctacagtaatcgttaactgttcggcaagcgatgagacaatcggtaaggcggcttatcgcgagagcctgatcgaagggcagtcggcaagattgatctgtggatacatttatgccaatgccggagaaggagagtctacgacagatctggtatttggaggacataatattattgcagagaatggaacgacacttgcatccagcaatcgtttctcaaatgaagtgatctatacagagatagatgtaaaacgtttattaagtgagcgccgcaagaatacaacgttccagacggaaaaagagaggacactgatccgtattccgtttgagatccatgtagaggaaacagagcttacaagaagatttgcatccagaccatttgtgccaagtgtgatggcagagagaaacttgcgttgtgaagaaattctgacgattcaggctatggggctgaaaaaacgtctggcacatgcacatgccaaaagtgcagtcgttggtatttcgggaggtctggattctacgctggcactgttggtgtcagcaaaagcatttgacgcattaggaatggatcgtagtggaattgtagctgtgacgatgccttgttttggaactacggacagaacttatcagaatgcatgcaagatgtcagtaaagctcggagcaacactgcgggaaatcccggtaggggcagcggtcgaacagcattttaaagatatcgggcatgatccggaggatcatagtgtaacctatgaaaattctcaggcaagagagagaactcaggtattgatggatgtagcaaatcagacaggaggaatcgtgatcggaacaggagatatgtccgaacttgcacttggatgggcaacttataacggagaccatatgtctatgtatggagtgaatgcatctgttccgaagacgctggtacgtcaccttgtacattattatgcagatacctgtgaagatcaggagttgaaagaagtactgtacgatgtgctggatacaccggtcagcccggaactccttccgccaaaagacggtgagattgcgcagaagacagaagatctggtcggcccttatgaattacatgattttttcttatattatctgttgagattcagctatgaaccaagtaagatctaccgtatcgcacgttatgcatttgagggtgaatatgatgatgcaaccatctacaaatggttatacacattctgcagaagattctttatccagcagttcaaacgctcctgtctgccggatggcccgaaggttggaaccgtggcattatctcctagaggagactggagaatgccgagtgatgcttgctcggaagtgtggctgcgggatttggagaaggtgaatccggaagtgtatagaagcaccggaaaatcaaggcttatattataattttccgattatacgtaaaggttataaaaaatagccgttctagtgaacgtggagtgtgtttagaaacagttagagcgtcaaaataaccgttaaaggaatgtagtgaacttgtttgagtccccaagggacgagttgtgaacgtaattcctttgtttttaggttattttggcgctcttactgtttcttagtgtacggaacctgaacaagaacaactatatactgtgttcttcaaggaccgagaggccaactctgttaatcgattaaatagaaactaatctaatttcaaccctttgaataaatccccaagacttgtaccgatctcttcagccttcgggatctctacatggatttcttcttcctcttttttctcttcttcgagagctttcatactcaggctgatcttgccatcttttattccgatgatctttacagttacttcgtctccgacatttaatacatcagcaggtgatttgattcgttttaagctgatctgggaaatgtgtaccagaccggagagaccgtcgccgagatctacaaatgctccgtaattctgaaggctttctacagtgcctgttacgatgcttccaactttgacagcggcaatcttagcttctctttcctttcttgctttttcctggagaatctcgcgtgcagagagtacgagacggttatttgcttcatctacatcgatgactttgacttcaatatcttttaacaggtaagtttcaagatcttcgatataggagagagataatctggatgccgggatgaatccacgcaaaccttcaaccatggcaatggcgccgccatttacaatcccttctacttttacaggaaggacggtacctttttccatgtaagattttactacattccatggatttgcatcgtcaaaatgttcctcaagatcagccattgtaacaggtgttccttcgttctgtgtttcttcgtgtaataattcttcgctcatagtattaagttcccttcttattattaagaacataattgaaaatgttcttttatactgtcttaagtatagcatagaagtataatattgttcaaagaaaaatacgaaatacatagaaataaaggttgacgaattcttaaaaagatggcaagcttaatacttaagagatgatataaaaagggatgtgaaagagaaaatatggctaagaaagcaggaaaaatatacgttgtgggacataagaatcccgatacggattccatctgttcagcaattgcctatgcaaatttaaaaagagaaataaccggtaatgattatattgcaaaaagagccggtcagataaatgaagagacacactatgtattacagaaatttggagtgaaggttccaaatcttctggagaatgtcaaattacaggtaaaagatatggatatccaccagatagatggtgtaggaccgaatgtatctttgaaagatacatggacaaagatgaaggagaataacatcaagacacttccgattttaagagatgaagagctcctgggtgttatttcaaccggagacattgcgacatcttatatggatgtatatgataatatgatcctttccaaagcaagaacgcagtatcgtaacatcatgaatacactggatggagagatggtaaccggtaacgaacatggatattttacaaaaggaaaagtagcaatcggtgcatcaagtccggagcttatgcaggaatttatagaaaaagatgatctggtgatccttggaaaccgtgtagaatcacagatgtgtgcacttgatattgatgtaagctgtatggtagtctgccagaatgcggaagtatccgaagaagtgatcaaacgtgcagatgaacagagtacggtaatcatcagtacaccgcacgatacatttacggcagccagactgatcaaccagagcgttccggtcaagcgctttatgacgaagacaccacttacttgtttccatatgagtgattatgtggaagatattaaggaagttatggcaaagaagaaataccgtgatttcccgattatcgaccggcatgggaagtttaaaggattcgtatcaagacgtcgtttcttaaatgtaagtaaaaagaaagtgatcttggtggatcataacgagaagaatcaggcagtagacggtatcgaggaagctgagatcgtggagatcattgatcatcacagactgggaaatatcgagacgatgggacctgtatttttcagaaaccagccggtaggatgtacggcaacgatcgtatatcagatgtataaagaaaacgacgtagagatcacaccaacgattgcaggacttctgtgttcggcaatcatttccgatacactgttattccgctcgccgacctgcacatcgctggatgaaaaagttgcaaagaaacttggaaagattgcaggaatcaatctggaagaacaggcacaggcaatgttcaaggcaggaagcagtcttgcaggaaagacggcagaagatatctgtttccaggatttcaagcagtttacagtaaatgatatggtatttggcgtgggacagctgaattcgatgagtaaagaagaactgcaggaagtgaaagagatgctgactccatatctgccggaagtactggagaaaaatggagtacagatggtattctttatgctgacggatattctggatgaatcgacagaactattgtgctgcggcgcaaaagcgaaagagtatatcattgatgcattcgatctgaaagaagacagcgaaaagatgatcttaaagggagttgtatccagaaagaaacagctgataccgactctggtaagtgaattacagcagtagaaaaaagcgggggaaaaagacatggcaaagcagatctggaaaccgggaaatatgctgtatccgctcccggccgtgatggtaagtaccgcagataaatccggtaaatcgaacatcataacggttgcgtggaccggaacggtatgtacgaatccggcaatgctgtacatatccgtaagaccggagcgatattcgtacgatcttctgaaagacagcggagagttcgtagtaaatctgacaactgaaaagttaaaaaaggcaacagactggtgcggagtacgctccggtcgtgatgttgataaatggaaagagatgcatctgacagccggcagagcatcaaagcttgactatgcaccgatcatagaagaatgtccggtgaacattgagtgtaaagtaaccgagatcaaagaactcggctcacatcatatgtttctggctaaagtagaggctgttcaggtaggagaagaatatctggatgaaaagggaagattacagcttggaaaagccggtcttctggcgtattctcatggagaatatctgacattgggagattcacttggaacatttggatggagcgtcagaaaagcttctgtatcgagaaagaataagaagaatgcagaaaagaagcctgtatcgaaaaagaataagaagagtacaggaaagaaagcggtaccgggaaaacgtaagaaataatatagaaaaatataaggtaaagcaaggcgtcagaattctggcgtcttttgtataccaaagtatgcaagaggaaaatgtcaatggcagctttttcgtattgcagtaaggtcagaaaaagaacccaggtatggaattccctgcccctgcatatagtaaaatgaaataatgctatgcgggtgtgacatgaaatcaaatatcgattgcaaatcagatataacatacaaacgacggaccaggatgaaaatggcaggaattttgctgatttatatattaggcatctatttccttctgacaaagatggtgcagttggaagatgaggctgttgtgggagtgaaaaaaactcataaggaactgtcagaaactacccattcaagtaatgaaaaggccattcagtatgtagaatcgaatatgataaaagaggcccctaagattgcaatcacatttgacgacggaccaagcccggcatggacaccgaaactactggatggattaaaagagcggaatgtaaaagcaacatttttcctgatcggggaaaatgcagaaaatacgccggaacttgtaaagagagaatcggaagaagggcatctggtcggcaatcatacgtatcaccatgtagaaatcacacgtgtaccggatgagacggcaaaagaagaaattctgatgacaaatgaagtgattaccgggatcacaggagaagaagtctcttatatgcgaccaccgttcggagcctggcagaagaagctggagtgggaactggatgttatgcctgtgatgtggacgatagatcctctggactggacaacgaataatgaagatgaaattgtcaataaagtagtgacgcaggcaaaggaaaatgatatcattttactacacgactgttatgagtccagtgtgaatgcggcactgcgtattgtagatatcctgcagaaggaaggatttgaatttgtaacggttgatgaactcattatgaattagattcaaaacgcagaatttatgaatcagatctgatgaatgaaaatttacatagataaatggagatgaaagaatggatttatttgattatatgcgggagcagaacatggaaaaagaggcaccgcttgcatccagactgcgcccgaccacattagaggaagtagtcggacagcagcacattatcggaaaggacaaattactttacagggcgatcaaggctgacaaattaagttcggttattttctacggtcctccgggaacaggaaagaccacactcgccaaagtcattgccaatacgaccagtgcggaatttacccagatcaacgcaacgactgcgggtaaaaaggacatggaagaagtgataaacaaagcaaaagagatgcagggaatgtaccggaagaagacaatcctgttcgtggatgagatccatagattcaataaaggacagcaggattatctgctgccgtttgtagaagacggtacgatcattctgatcggcgcaacgacagagaatccgtattttgaagtgaatggggcgttgctttccagatcgagcatctttgaattacagccgcttgccaaagaagacatcaagacactgatcacaagggcagtctatgatacggtaaaaggtatgggaagttaccaggcagtgatcgatgaagatgcactggaatttcttgcagacatttccgggggagatgccagaagtgcattgaatgcagtcgaacttggaatcctgacgacagaacgaagtgcagacggaaagattcacatcacactggatgttgcatccgaatgcattcagaaacgtgtagtcaaatacgataagaccggagataatcattatgatacgatctctgcatttatcaaaagtatgcgtggctccgatccagatgcggcagtgtattatcttgcgaaaatgttatacgcaggagaagatatcaagttcatagccagacgtatcatgatctgcgcatcggaagatgtaggaaatgcagatccgatggcacttacggttgccgtatctgcttcccaggcagtcgaacgaatcggtatgccggaagcacagatcattctttctcaggcagtcacgtatgtagcaactgcaccaaagagtaatgccgcatgcaatgcaatctttgatgcaatggcaagcgtgaaacgcacaaagacaacggttccgtcacacctgcaggatgcccactataaaggagcccagaaactgggacacggcatcggatataaatatgcacataattatccgcaccattatgtagaacaacagtatctcccggacgagatcgtcggagaaaaattctatgtaccaagcgagaatgggcatgagaaggagattaaagagtggatgaggtatatccgggaaaatcagtgagttgctgtttaatgcagtatcgtggtttaccccagtccatgagaaagacttggtattctgcttcgggctaagattctacgatgaagaagttataagggcgtcagaattttctaaaagcacccggcctaggagtcaaactcgccatacggctcaaacagtgactcctattctgggtaacgaccgcttcatgcattaaatatcttttatagttccatcaatcccaatcgtcaccacctgccaaggaataaacttcccgcttgcttttaacgcttctgtagcggcatgctccagtcctccgcagcaaggaacttccatacggacgatagtaagacttttgaaatcattatgcttgatgatctcggttaatttctccgtataatcaactgcatccagcttcggacatccaatcagtacaacgtgattcttaatgaactggttgtggaagttgccatatgcatatgccgtacagtcggctgcgatcagcagatttgcgttctggaaatatggtgcgctcagcggagcaagcttgatctggaccggccactgacgaagctgactttccatggagtaagcggtcggtgtacttcctgacatattattagaagcacttgcatcattattatgagtgtgttcaaccgaacgagccatagaacccggacatccaccatgaggagcagtgtgttgaatttcacgagccatagaacccggacatccaccatgatgtggagctggtgcatcattatcgtgagcatgtgctttttttgcatcaaggtgtttcttaagtgcttccggtcctttggcggcaagatgtgcttttactgcatcatcatcataagcatccgcttcacgttcttcaaatgtgattgcatttgtcggacaggccggcagacagtcaccaaggccatcgcaaaaatcatcgcgcattaatcgggcttttccatcaaccatctgaatggcaccttcgtgacaggcgttggcacatgcaccgcatccgttacatttttcttcatttatatggattatttttctgatcataatgattctccttttcttaaaaaatagaaatatgtttaaaatggtatcagttgttttgcaggtattagtgtactataaagaagaaaaagaatgttgttggaataacaacaaaaataaaaataattacaataccgcaattaagatgtccgtaatgtatctgaaataatggatgttaagtatggaaaaatgacagaagaatgtgttaaaatttttcacagagctgatatttctgcaagcaaaatacaaaaatcagaaacagaagcattataatttgaaaaatataatataggaaaagaggaagatatatggcacagatttatgcatcgaaaacaaatgaaattcagaagtatgagacagagcatgagaatgaagtacgtcatctggccggggaatgtatggtccttttggagaatgacggtgtattaccattttcagataagataaaaaagattgcattatatggaacgggagccagacatacggtgaaaggaggaacaggatccggagatgtcaatgtaagaaaaacagtttcaatcgcacggggattagaagaagccggatttgagatcgtgacagaagactggcttgacagatacgaccgggatctggaagaggcgcagaaaacatatttgaaaaaattaaaagatatgtcagatgagacgggagagccatcggtaatccttgggttcaaacatccgtttcaggaaccggagcagccaattgtcgaagagacagatatcaaagaggcagatgcagccatttatgtgcttgcaagaaattccggagagggaaaagaccggcgggcagaaaaaggagattattatctgagtgacagagaattgcagaacatccggtttatgacggaaaattattcgaattgtgttgtattattgaatacaggaggcgtgatagatctgacagaattgcggaagatttccggagtgcaggcaatccttctgaccggacaaactggaaatatgggtggccatgcagtggcggatgtcttgatggctaaaacagttccgtcaggaaaattaacagatacatgggcaaaatcttatgatgactatccgtcatcgagaactttcagttaccgcgatgacaatctggatgatgaatactatagtgacgggatttatgtcggatatcgttattttgatacatttggaatcatgccgttgtattgctttgggtatggaaaaggatacacggatttctcattggtgaccaaagaagtgaccgcagatgaaaagttggtaaaggtagaagtggaagtgacgaatatcggtaaggtatatccgggaagagaagtcgtacaagtttattattcggcaccggatggagttatggaaaaaccaacacaggagcttgcaggatttgccaagacaaagcttctcatgccaggagaaaaagaagtggtaacagttacatttgcgacagaagatatggcatcttatgacagctatgatgcagcatgggtcatggaggaaggcgagtatacgattcgtgtggggaacagttcacgtacaacggaagtagccgcgatcatagatctggatgaaacggttcagacggttcttttaaagaatgtgatgaaggataaggaatttgtaaaagagattcatcatatggtcccaatctttgacctggaactggatgacacaccatttatgcgcccgatattgatctatgcggaaaactttaagaaaaagatcatggaatatgaagtgatacgtactatgttggaagataaaagaccggacgagatattaacactggaggatgtgaagaagggggcagcatcactcgaagaattggttgcacagcttacggtagaagagatggccgatctttgtgtcggaaccgaacgactggaagaaggcggtaatgtaatcgggtcatcttctgcatgtgtgccgggagcagcaggggatacgacgtcggcactgatcgagaagcggaagatcccgaatctgatccttgcagatggaccggcaggattacggttacagacacattttaaaacggataaagaaggcaataaattaccgggtggggaacagttcggaatggaaattgcaccgtttgcgaaagagcagccagaaggagcgcaggattattaccagtactgtacggcaatcccgattgcgacgacacttgcgcagtcatgggatgtggatcttatcaagagaatgggtgagattgtcggagaagagatggaacagtttcatattcacctgtggctggcaccgggcatgaatattcacagaaatccattgtgtggaagaaactttgaatattattcggaagatccactgcttaccggactgtgtgcggcagccgatacaaagggtgtacagtcttacaaaggacatggaacgacgatcaagcattttgcggcaaataatcaggaagacaaccgtatgttcacgaacgcacatatcagcgaacgtgcattaagagaaatctatctgaaaggattcgaaattgcggtgaagacagcacagccctatgcgatcatgacatcgtataatctgatcaatggaacacatgccgccaatcattatgacatgcttcagaatgtagcgcgtgatgaatggggatttgaaggctttattatgacagactggtatacgtctcaggatacgacggcacttggaatggtatcagaaagcgggaaatacagctattccgatggtgtacagtgcattaaggcaggaaatgatcttcagatgccagggtgcaggaaaaatgtagaggatattgtagacggcgtaaaaaatggaaggattaccaaagcggatctccagagatgtgcaaaacatatccttggaattgcgttaaaaacaatataaacgaaaaagaataaagtgattaacaggcagacaatatattataagtagtctgcctgtttgcgttgatgtgcattcgaaagaagtggtaatcagaaggttttttacattttctaaaaaatatctaaacagtgttgacaaaaatatgcgagagtgctatcttaatagtcgaaaggtgttagcactcagataaaaagagtgctaataaccggaaaccgaaaggaggaggtaccggtgataaatcatgaagagatgagtgaaagaaaactgaaaatacttcatgcaatcatccagaattatctggagacaggtgaaccggttggttccagaacgatttccaagtacacggatctgaatcttagttcagcaacgatccgtaatgagatggcagatctggaagagatgggatatatcatccagcctcatacgtcggcaggacgtattccttcggataaaggatacaggctctatgtagatatgctgatggaggagaaagagcaggagctgaatgagatgcaggatcagatgcttgacaaagcagataagatggatcagcttttgaaacaggcagcaaaggttcttgcaacgaataccaactatgcaacgatggtttcgactccgatgaacaattcaaacaagattaagttcatccagttatctatggtagatgaggaacaggtgatcgcagttatcgtactgggaggcaatgtgatcaagaataagatcattaacattgatgagccgatcagcaatgagaatctgttaaagctgaatatgctgctgaatacaacactcaacggcatgtcgatcgaagaaatcaacctgggattaatcgccagattaaaggagcaggcaggaatccacagtcaggtagtcggatatgtactggatgcagttgcagatgcgattcatgtagatgatgatatgcagatctacacaagcggtgcgacgaacattttcaaatatccggagctgagtgataaccagagcgcacaggaaatcatcagtgcatttgaagaaaaacagcagttatccgaactggttacacagaccctggcacaggatgagaataccggcattcaggtatatatcggagatgagactccggtacagactatgagagactgcagtgtcgtaactgcaacctacgaactgggtgatggtatgaagggaacgataggaattatcggaccgaaacgtatggattatgaacatgttttaaaatctatgaaacgtctccagacagaactggatcagatgttccataagaatgatagaaaggtggaataacccttggaaaataagcaggaaaaaagccaggaagatatggtaaaagaagctgtagaagaggcaaaaaaatctgctgctgaagcaaaagaagcagagacggatacagacgagacaacagaaacttctgaaaaagtggaaaacgaagaagccgaagagacagcgaaagatacagaaaagaaatctggcaaaaaattatttggcaagaaaaaagataaaaaagacgagaagatcgaagagcttacagataagcttacccgtcagatggcagagtttgataacttccgcaaacgtacagaaaaggaaaaatcccagatgtacgaagttggagcgaaagatatcatagagaagattcttccagttgtagacaactttgaaagaggtctggatgcagtgaaggaagaagacaaagaagatccgttcgttcagggaatggagaaggtgtataaacatctgcttaccactctggaaggaatcgaggttaagcctattgaagcagtaggccagccgtttgatccgaatttccacaacgcagtgatgcatgtggaagatgaaaacttcggtgagaatattgttgccgaggaatttcagaagggctacacataccgtgattcagttgtaagacacagcatggtaaaagtagcaaactagaaacaagaacattcacaattatcagaataaaaaatcatacaggaggaaatttatcatgggtaaaattataggtattgatttaggaacaacaaacagctgtgtagccgtaatggaaggtggacagccaacagttatcgccaacacagaaggcgcaagaacaacaccatctgtagtagcatttacaaagacaggtgagcgtcttgtcggagaacctgcaaaacgtcaggcagtaacaaacgcagagagaacaatctcttctatcaagagagagatgggaaccgactacaaggtaacaattgaagataagaaatattctccacaggagatctcagcaatgatccttcagaaactgaaagcagatgcagaaggatatcttggagaaaaagtaacagaagctgttatcacagtacctgcttacttcaacgatgctcagcgtcaggcaacaaaagatgcaggtaagattgcaggacttgatgtaaaacgtatcatcaacgagccaacagcagcagctcttgcatatggtcttgacaatgaaaaagaacagaagatcatggtatatgaccttggtggtggtacattcgacgtatctgttatcgagatcggtgacggagttatcgaagtattatctacagccggtaacaacagacttggtggagatgacttcgaccagaagattacagactacatgatcgctgaatttaagaaacaggaaggtgttgacttatctgcagataagatggcacttcagagattaaaagaagcagctgagaaagctaaaaaagaactttcttcagcaacaacaacaaacatcaaccttccattcatcacagctacagcagaaggtccaaaacatttcgatatgaaccttacaagagctaaatttgatgaactgacacatgatcttgtactgaagacatctgagccggtacagagagcattatcagatgctggtatcacagcttctgaacttggtcaggtactgttagttggtggatctacacgtatccctgcagtacaggaagaagtaaaacgtctgacaggtaaagagccaagcaaatctctgaacccggatgagtgtgtagcacttggagcatctgttcagggtggtaaacttgcaggagatacaggcgccggcgacatccttcttctggatgtaactccactgtcactgtctatcgagacaatgggtggtgtagctactcgtctgatcgagagaaatacaacaattcctacaaagaagagccagatcttctctacagctgctgataaccagacagccgttgatatcaacgtagtacagggagaaagacagtttgcaagagataacaaatctctcggacagttcagactggacggaatcgcaccagctccacgtggaatcccacagatcgaagttacattcgatatcgatgcaaatggtatcgtaaatgtatctgcaaaagaccttggaaccggaaaagaacagcacatcacaattacagcaggatctaacatgtctgatgaagatatcgacaaagctgtaaaagaagcagctgaattcgaagctcaggacaagaaacgtaaagaaggaatcgatgctaagaacgaagctgacgctatggtattccagacagagaaagctctgcaggaagttggcgacaagcttgacggtgcagacaaagcagcagtagaagctgactgcaaagctctgaaagaattacttgaaaaagcaaatacagatactcttacagatgagcaggttgcagagatcaaagcaggtaaagaaaaactgacagagagtgctcagaagctcttcacaaagatgtatgagcaggctggcgcagcagcaggagctcagggagctggtcctcagccaggagctaatgcaggagcaggcccggcaccagaaggattccagggcgacgatgtcgtagacggagattacaaagaagtctaagaacattaagtgaggaataggaaatggcagagtcaaaaagagattactatgaggtgcttggggtcagtaaagatgctgacgaagcaactttgaaaaaagcatacagacaggttgccaagaagtatcacccggatatgaatccgggtgatgctgaagctgaaaagaagttcaaagaagcttctgaggcgtatgcagtcttgagtgatccggaaaaacgccgtcagtatgatcagtttggtcatgctgcttttgacggaagtgcgggagcaggcggcggatatggcggattcgactttaacggtgctgattttggcgacattttcggagatatcttcggagatctgttcggcggcggacgcagaggcggtcgtgcgaaccagggaccgatgaaaggtatgaatatccgtaagagtgtcagaatcacattcgaagaggctgtattcggatgcgagaaagaattggacgttgtattaaaagacccatgtccgaaatgtaacggaacaggtgccaaaccgggaacatctccggagacttgtccgaaatgtggcggtaaaggtcaggtagtatatacacagcagtcattctttggaacggtacagaatgtacagacctgtccggattgccagggaactggtaagattattaaagaaaaatgtccggattgcggcggaacaggctatgtagccagcaagaagaagatatccgtatcaattcctgcaggtattgataatggccagagtgtcagaattcgtgaaaaaggtgagccgggtgtaaacggcggaccaagaggagatcttctggtggaggttgtggtatcaagacatccaatcttccagcgtcaggatatgcacatcttctcaacggtaccgattacatttgcacaggcagcgcttggtgcggatatccgtatcaagacggtagatggagaagtgatctacacggtaaaaccgggaaccaagacagatacaaaagtacgtctgaaaggtaaaggagttccatctcttcgaaatgcacaggttcgcggcgatcattatgtgacacttgtggtccagacaccggaacacttaagtgccgaagcaaaagaagcactgcgtaaattcgatgagctgaccggcaattccctcggagcagagaaatctgaaaaagcggaagagcacgaacataaaggcaaaaagaaaaaaggatttatggataaattaaaggagacctttgatgattaatttcatcagaggtttcctcttttttacaaaaaacactggcattcaccgtggtaaagtgatatcatattaaataaattaaatttttaacaaactaggaggactcaaatatgtatgcatttgatgaaattaaaaaagcagacagtgaaattgcagacgccattcaggccgagatggagagacagaattcgcatctggagctgatcgcatcggagaactgggtaagcaaagcagtcatggcagcaatgggaagtccgcttacaaataaatacgcagaaggctatccgggcaaacgttactatggtggatgtcagtgtgtggatgtagtggaagatcttgcaagagaaagagcaaagaagttatttggctgtgattatgccaatgtacagccacattccggagcacaggcaaatctggcagtattctttgcaatgctggagcccggagacaaagtcatgggtatgaacctggatcatggcggacatctgacacatggttctccggctaatatttccggtaaatatttcaacgtcgtatcatacggagtgaacgacgagggtgtgatcgattatgataaggtacgtgagatcgcagtaaaagaaaaaccaaagatgatcattgcgggagcaagtgcttatgcaagaatcattgatttcaaaaaattccgtgagatcgcggatgaagtaggagcatacctgatggttgatatggcccatatcgcaggacttgttgcagcaggacttcatccaagcccgatcccgtacgcagatgtcacaacaacgacaacacataagacactgcgcggaccaagaggcggtctgatcctctgtaatcaggaagcagcagataaattcaactttaataaagctgtattccctggaatccagggaggaccactggaacacgtgatcgcaggaaaagcggtatgcttcaaagaagccctggagcctgaattcgcagaatatcagaaacagatcatcaaaaatgcacaggcactcagtaagggactgatggaccgtggagtgaagattgtatccggaggaacagataatcacctgatgctgattgatttaagaggagaagatgtgaccggtaaagaactggaaaaacgtctggatgccgcacacatcacatgtaacaaaaatacggtaccgaacgatccaagatcaccgttcgtgacaagcggtgtcagacttggaacaccggcggttacaacaagaggattaaaagaagacgacatggatatgatcgcagagtgtatcgcactcgtacttcagagtgaagataacattgaaaaagtcaaaggaatggttgcagagctgactgcaaaatatcctctggatatgtaaggaacgacgaaagaaaataagacaaaacaggaaatccgtctgggaaaaggatttaagcttacccaggcggattttattgttgcttgaacaaaatgtccaacagtgaaaagattgagcaaaatatttgagtagttgatagaaataggagaataacaagggtggaatttttaaaaggaagggcgtataataaaaatcagtgtatacgaatctataccagaataaaaaaggaagaatcttgtttataccatacagatgtatgaatgcaaatatatatggaaggagccagatttttgaaactgagaaacgtaaaagtcgcaaaaagattaggaacaaaaacgcttgcagggttgcttgcatttggacttatcgtaggtacgccgtcggttgttctggcagatgtacagagcacgatgtcacagtcagaggctttgtggaacagaagtatctggacttcagtgatgaaacaaaaaagcagattgaagcgaatggtgaggataaatatcagacagcaaaagaaacggtaaaaccagaagaaaatcaggcattatattatacactgacttctgtaaaagagggatcgccaagtggagaaatccgggaatccatgctggaatttgcgtcacagtttatcggtaatccatatgtgtggggtggtacaagcctgacggacggtgcagactgctctggattcgtacagcagatttataaacagtatggatacagccttccaagagtagcagaagatcaaagccagtatggaacgaagattcctgtagaagatgcccagccgggagatctgatcttctatgctaaagaagggtatgtatatcatgtggtcatgtatgcaggagatggcaggacgatagaggctgcaagtacgaaactcggaattatcgaaggaaaagtcaataccaaaaatgcagtatgggcaacacgtatcctgaaagatgattattctcttacaggcgacggaattgaaaaggccaatgcaacagaggacatgtatggacagaaacttgaaaatttccagattacatattattgtccttgcgagatctgctacgataaagcatctaaagttacggcatcgggaacacctgttgcagaaggaaagacaatcgcaactgatccgaatgtaattccatatggaaccaaggtgattatcggaggacatgtatttacagcggaagatacaggaagaaaagtccagggaaatcagatcagtatttatgtaaataaccatgcagaggtatctgcttctgacacagagaatacagacgtatatctggcaaaataatataataaagaatgataaaaaggtggtttttcagaacttacatgttgaaaaactgcctttttcaaagaaggaacagaaactatgaatcaagaaaatttattgaataagatcagacagaaagatgcaaaagcatttactcacgggggaaaatttcatgcagatgatatattttcatcggccttgttattatatctgaacccggaaattcagattacaaggggaaatcaggtgccggaagagtatgacggtattgtatttgacatcggacggggagcatatgaccatcatcagaaggacagccgtgtcagggaaaacgggattccatatgcggcattcggacttttgtgggaagagttaggaacggagattcttggagaagaactggcagaaaaatttgatgaatcctttgtccagcctctcgatcagaatgataataccggtgagaagaatgaactggcttcgctgatcggaagttttaatccggcatgggatgcaaaaggaaatcatgatgatgcattctttcatgcagtcagtatggctggaatgatactggaaagcaagttcgagagattccgtggaaatgaaagggcggacaggaagatagaagagattttggaggcacatgatgatgcagtagaagagggaaaatgtgatgaaagaatcctgattcttccggaatttgttccatgccagaaacggctgtcagagacggagattgcatttgtgattttcccgtcaaatcgcggaggatattgcattcagccacagaaaaaagaattttccatgaattataaatgtgcgttcccagaagcctggcttgggctggagggagaagcattacagaaagcaaccggactttcaggagcaggattctgtcataaaggcggcttcctgatgtcgacagagaatctggaggatgcggtaaaagcgtgtgaaatcagcctcaaagagtatgtagaagcgccgtgtattgtctgttacggaacatgtgatgaagaagtgaaagaacttctgcatatgcttccggaaatgaagaatgtaacggtacataagatgccgctgtcagagccgccggagatggagacagatggaatctatggagaagttttgatggaaaagcaggaatggaagaagcggataaaagaacaggtaaaagaaattctgaaatacaaaccggaggcggtatgtgtgaatggaaatgtcttttcgacttatccggtagtacatgcgcttcgtaaaaagcatgtgccggtgctgacaataatagaaaatgatgaggagaagctgattgtgagaattccgtccggttcttagaatgtcagatataatgaagtagaagaagtaatagaacataacaaaaacgcagagacttttaaaaggattgaagtaatccctcaaaagtctctgcatttttatgtttatttacatgcttttaaaagttctttcaggtagttccacatacgctgtgtagatgcgatatgtacacgttcattatatgtatgcacacctgtaagatccggaccgaaagaaatgatatcaagatcattcttcttgccgtataagattccacattccagtccgccgtgagttgtctcaacagtaggttcttttccgaacatttctttataaagttcgattgccttaggacggatcacagaatctgcattgtagctccatgccggatattcaccggaaatctcacgggatgcgcttgcaagatccgttgcaagatccagtttgttctgcatatcatctaacttggtagcgacagagcttcgaacctggaatttaatctttacagtgtcttcagtagtctcaacaatacctgtgttcagggaagattctacagcggtagggaatgcacggtcatagcactgtacaccgtcgatcgctccataaaggaatccgattacatgtgaagtagtatctgcatcaaaggcctttaaggtcgtctcgccatcggaaactgctttcagagataaagtaggttcctgtccggcaaattcagcgtagatagtctgttccagtccggcaacagcatctatgatatcctgagcctgtgcaggatctgcgatgatctcagtcgtattgtactgtgcgattacgtttgccgcatttccgccgtttgtacttacgatgttaaagtcgtaatcttttgcaagtgcatacagaacacgtcccatgatcttatgtgcatttccgagctgcttctgaatctcggcaccggaatgtcctccctgcagattggaaagggagattgtcatcttggttccgctttcttcactccattcgatcgggataaaagtatcataaatgtatccgccggcacatccgactgtcataacgccttcaatctcagagtcgatgttcaggcagatctttccttttaatacggatgtatcgaggtgatgtgcaccgcccataccgatctcttcatcaactgtaaatacagcctcgatcggtggatgcgggatatctgtgctggcaagaattgccatagcataagcgactgcgataccgtcgtcaccgccgagagtggtgttctttgccccaatcagatcgccatctacaaaaaggtctaacggatcattctcaaaatcgtgatcgctgtcggttgtctttgtagcaaccatgtccagatgtccctggatgatgaccggatcactgtcttcatatccggcagtaccaggttttttgatgataacgttgttcatttcatcctggatatattccagattgtgtgctttcgcaaattctacacaaaaatcactgatcttttttgtgtggaaggtacttcttggtaccatacttaattcttcgaagtactgaaatacttcttttggttcaatattagacaaaattcccattgttcattcctccgtttgtctttaatctctatttatcattgtatcatgaattttagcactttatcatgataaaatgtaatgtgtgtataatggaatgtaatagctctgataaccacagcttataaggtttcattaaaacattcaataactacaggtctacccaaaaaaagcagaaaaatatataatatttaaggttgaaaatatgagagcagaatgtacacgggaggatatgtatgagtacaaaagaagcaaaacagatggatcaggcattatttgatttttatgggaaaccttctatcggacaggcactgccgcttgcaatccagcatgtgcttgcgatgatcgtcggatgtgtaacaccatcgatcattgttgcaggtgtggcagggctttcgcaggaagattccgttattttaatacaggctgcactggtgatgtcggcactgactacattattgcagttatttccttttataaagacaaaaagtttccgcatcggatcggcacttccggtgatgatgggaatcagtttcgcatatgttccgagtatgcaggcaatcgcagcagattttgacattgcaacgattctgggagcacagatcgttggtggtgtgatcgcattgttagtcggactgaatattaagagaatccgtaaatttttcccgccgctgattaccggaacggttgtattttctattggactgtctctgtatccgacggcaatcaactatatggcaggcggtgcaagcagtaaatcatacggtgcatggcagaactggctggtagcactgattacccttgtgatcgttacggtattgaaccattatggaaaaggtgtgtggaaactggcatcgattctgatcggaatcattggaggatatattgtggcattattctttggaatgatagatttttcatcggttgcacaggcatcattcttccaacttccaaagccaatgcattttggtatcaaattcgagccttctgcatgtgtggcaattggaattctgttcgcaatcaatgcggtacaggcaatcggagacttctctgcaacgacaacaggttctatggaccgtatgccgacagacgaagaactgacaggtggaatcgtgggctatggtatcagtaatattatctgtgcattcttcggtggacttccgacggcaacatacagccagaatgtaggtattgtatctacaacgaaggtagtcagccgtgtggtaatgggaatggccgccgtgatcttactggcagcaggactgattccgaagttttcttctttactgacaacgattccttactgtgtactcggcggtgcgacaatctcggtatttgcatcgatcacaatgacaggtatcaaactgatcacaacggagccgatggatttccgcaatacaacagtagtaggacttgcggttgcagtcggaatgggtgtgacacaggcaaatgcgtctctggcacagttcccggaatgggtaacgacgatctttggaaaatcaccggtggtacttgcaacgatcgtagcaattgtgttaaacttaacacttccgagaacacaaaagaaagctgagaaataattcatatatgataaaaagttatacgaatggtgaatggaaagagcctggcagtttatgccaggctgttggaatttataaagaagattttcataagatagtatcggtcgtagggggcggcggaaagacaacggtgatccgtgcaatgctccgggaatgtatggaaaattcggatggaaggattccatgcgcggtctcaacaacgacgcatatacaaaaaacaaatgcggaatattttctgggagaaccatcgatgaaaatgttccggaagaagctgtcggattacgaagttgtgtggatggggcgtgagatacggaaaggaaagcttgcatcatttcagaaggagtttctggaagaagtaagccgggaacctgtacttttgcttctggaagcggacggggcaaagcattttccagtgaaagctcctgcagaacatgagccggtgatctgtgagaaaacgggcatagttctgaatgtctatgggatgcgtgcgattggaagaaagataaaggatgtatgttttcgtatcggagaagtggagaaaattcttggaaagacaggggaagatattttgcgtccagaagatatcatgacacttgcggtaagtcggagtgcaggacgcaaatgtgtgacggatgagatggaatatcaggttatactgaatcaggctgatacagaggaagagaaacagacggcaaggcagcttgcggaagatattggaaagaaactgtcagagaagtatatatcagagaagaatacaaaagatacagagttttcaagacagatcagcaaagtccacgtaacatcggacctgattccgctggaagaaagatggtagatatgtcagaaatttataaaaataagaaaaaggcattggtccggggatccggagacctggctaccggcgtgggtgtagcactttatcgggcgggctttcaggtgatcatgacggatattgcagtgccgcttaccgtaagaagggaagtggcgatgtccagagccgtttatgaaggcagggcaaaagtggaagggatagaaggaatccttgtccggagttatcaggaagcgttggctgtactggaagaaaataagattgccgtgatcgtagatccgaaagccgagatctgcaaggaatttcacccggatctacttgtggatgccatccttgcaaagaaaaatatggggaccagacggacggatgcaccgtatgtgatcggtctcggtccgggatttactgcgggaaaagatgttcatgctgtgatagaaacgatgcgtggtgagacgcttgcggatatcatctatgacggacagccgattccgaataccggcgtccctggatatgtgggcggttatgcgctggagcgcctgatccgtgcgtctggcaatggccgaatggagccaaaggcacagatcggagatattgtaaagaagggacagcttcttgccgtaacaggaggaaaacctgtatattcccagctggacggtgtgatccgaggcatgctgcaggaaggtgtgcaggtgaaaaaaggtctgaagatcggagatgtagatccaagaaaagacagaaaattgtgttacctgatttcggataaggcgaataagatcggcagttctgtagtgcgggcgacagaagcacgtctggcggataaggattatgcaatgatccttctggcagcaggaaagtcaagcagatatggcagtaataagctgttagaagaactggacgggggaagaatgttcgaacatacccttcgtaagatgcgggcatttccgttatgtatacaggtagcggtgacgagattcgaagagatagaacgtgcagcagaagcacagggtatgttggtagtggagaactgggaaccggatcttggaatctcacattccctgagattaggactacagaaagcactggaagaaaatccagaattaaaaggtgcaatgttcattgtatgtgaccagccgggattgacagccgcaacatttgcccgtatgcttgatataggtaagaaatatcctggaaagatcgtatgtgccgggcgaaagggcaaaatgggaaatcctgtattgtgggatcgatgcttttttgatgaacttagcaggctttccggcgacaagggcgggaaacagatcatcggagcacatatggatgatgtgctgctctgcgaaacagaagaatcagaacttcgggatgtagatataccggaacaactgacaaaatgggagagagattatggagaatcaggaaaatcaggagaagaaacataaacggagagtccggtattccggaacacatccgagaaattataaagaaaaatacaaagagctgaatccggaaaagtatgcagataccatttccaaagtcatcaagaaaggcggaacaccggcggggatgcatatttctatctgtgtgaatgagattctggacttttttgatattcagccgggacagcagggattggatgcaacattgggatacggcggtcatacgtcgaagatgctggaaaaactgcagggagaagggcatatctatggtctggatgtagacccgatcgaatcggcgaagacaaagaaacgactggaagaaaagggattcgggccggatatccttacggtaaagcttgagaatttcgcaaatatcgataaagtggcagaagaggccggaaagtttgatttcgtactggcagatctgggtgtgtcatctatgcagattgacaatccggaccgtggttttacattcaaggcagagggacctttagatctgcgtatgaatccggaaaaaggaatcagcgcagcagaaagactgcgggatatttccaaagaagagcttaccggcatgttgattgaaaattcggatgagccatatgcagaagaaatcgcagaagcaatcacagagaagatccgcaaaggcggcaagatcgagacaacaacgggacttcatcaggtgatcgaagagacacttgcatttatcccggaaaaagaaagaaaagaagcagtacggaaatccagccagcgagtattccaggcacttcgtattgatgtgaataatgagtttgaagtattgtatgatttcctggataagctgccgggtgtattaaagccgggcggaaaagttgcaatcctcacattccattccggagaggaccgtcttgtaaagaaatcattcaagcaatggaaaaaggagggactgtacagtgagatcgcaaaagacgtcatccgaccgtccaaagaagaatgcttccgcaacagccgtgcgaaatgcacgaaaatgcgctgggcaatccgggcagaagagtaagatacaaaataagaaacagaaagacggaaagcagacaaagaataaatctgcatgtaagattgataaaaaatgtggcggttgccagttccagaagatgccgtataaagaacagctgaaaagaaagcagaagcaggaagaacagctgttaggcggattctgcaaagtcagcccgatcattggcatggaacatccatatttttacagaaataaagtacatgcggtatttgaccgtgacaagaagggcaatgtcatatccggcatttatgcagaaggaacgcaccgtgtgatcgcagtggaagagtgtctgatcgaagataagaagagtcaggagatcatccgcacgatccgtgaacttctgccgtcttttaagattaagacatacaacgaagataccggatatgggcttttaagacatgtgctggtccgcagaggatttgaaactggtgagatcatggtggtgctggtactgggctcaccgatcctgccatcaaagaataactttgtgaaggctttgagaaaagtgcatccggagatcacaaccgtagtactgaatgtgaataacaagcagaccagtatggtactgggagaaaaggaaaagccgatctacggaccgggatttatcaaagacaagttatgcggatgtacattccgcatttctccaaaatcgttctatcaggtaaatccggtgcagacagaagttctctataatacagccatggactatgcggaactgaccggaaaagagacagtgatcgatgcatactgcggaaccggtacaattggtctgatcgcggctaagaatgcgaagaaagtgatcggagtagaactgaacaaagatgcggtaaaagacgcaagaatcaatgcaaaagaaaatggcatcacaaatgccgagatctatgcaggtgatgcgggaagattcatggtagatatggcttcgaagaaccaaaaagcagacgtcgtattcatggatccgccgagagccggaagtgatgagaagttcctttcttctgtgataaagcttggcccaaagagagtggtctatgtgtcctgcaatccggagacactggcgagagatttaaaatatctgaccagacatggataccaggctgtgaagatccagccggtggataattttccgttttgtgatcatgtcgagacggttgttcttttgtcccaacaaaaaccagatgacacgatagagatcgacttagacctggacgagctggatgccaccagtgccgaattgaaagcaacctatcaggaaatcaaagattatgtgctgaaagaatttggcttgaaggtttcaagtttatatatttctcaggtaaaacgcaaatgtggaattgaagtgggagaaaactataatcttccaaaatcagaaaatgcaagagttccgcaatgcccgaacgagaaagaagatgctatcaaggctgccctgaaatattatgcgatgatctaaggacatcgctgatttcaaggaggaataacacatgaaaagcacatttaaaaaatgggtggaacctacacacttggcgcagacggaatttactatccgaatcttgtcagtacagatgaagaaccgcattatgggaaatatggaatgatgcggaaaacatatctgaaagagcatcgtccggcaatgtattcaatgtatatgttggaagacagactgacagaacatctgaatactgtggacgatgaagcacaggagagaatggatattctggtgcgttagatgatggagaggcagggcattacggaagaattgaaagcttgtgaccagatggaatgggtcagagcggtaaataatgtccggaatgctgcagaagagattgtgttgaaagaattgatttacaggtaaacaaagggctgaacaggtaggacgaaaaatcctatttgttcagctcttgtgtttataatgggcaaagaagaaccaaattataattccatatcatacgaccttttcttagtccgagcaggctgatttcgccgtatttcctgtttcctttgatattcaagttcccatgcacgatgggagaaaacatcaggatcttccacattgagataatccacgtcattggctgcaatatcacggcggtgatagtcataatatttaccgaaagtccccttgagctgctcgatcagcttatcccggaaagcaggacgtatctggagtctagtatccagtaattcagtatattgttctggttcaggacgaaatttttcttcccggaaagcggcggcgtctttttcaagctgtttttggagcgagatgtcctgagaatctaggatatcaagattgttattcatctggtcgtatttcttggatagattcgtcatatctttatcggtagagcattctgcctggaagattagctgctctttccttgatttcagttcttcaatttcttcggtaacagtggtaagctgctgattcaattttatatgctggatgggattaaaaatactggctttctcttttttcacattcagttctttccgctctgtaactttagctttgagtttctttttaacggtgttgtatttattcagtattggattaaaatgattcatccagtcatggatcacttctttttgcatctcattgtggagcaaatgatattgtgtaaaaatcatgtgattaggatcatatgggtttccgcttccgtggatggatgccgtcttgtcatccgaataaaggaaaatgaagacgattttacggacagttcaaaaatcagttcagacaataacgaagaaggaaaagatattattgcagatacggactgcacaattgtagatattataacgcgtaccggcactcctatggtacagcgggggacaaaagtgaaaaaaggagctatccttgtgtctggtcagattccaatctgtaatgatgaaaaagagattaccggttacagattgaaaaatgcagatgcagacataacaggagaaaaagccattacatatcagaaagagttaaccagacaatatatacagaaaaaatattaccgttcaagattttactttctccagaaaagaaattacggaatccgtcttggcaggcattatttcacgactgaatctaaaaacaatcaatatccggtcttcgaaaaacatgtagatcagaaaaaatatcagattgccaatgtaattccggtgacattagaaaaaagcacgataacgccttaccgccaaatgtataagaagtataccaaagcagatgccagaatgatattatcggcagattttcaggattactgtaaagaattggagaaaaaaggggtagaaattatccagaatgatgttaaaatatacacagggtctgagacgtattatgcaaagggaacactaaagatcaggtgttccgttggcagaaagatgccgtctgtaccgattccgatagaaaattcttcggaagaagaaacaaagaatggagattaatgcatgggattaatggaaacagtcatcgatatacctgcagaacatgaagcgaatgtgttcgggcagttcgatgtatatgcaaagaaaatagaacgggctcttcatgtaacactgatcgcgagaggtgaaagtgtaaagatcatgggagatgctcttaaggtggaaaaagcaaaaaaagtgctggatcagcttgttgaactttccaaaaggggcaacacgattcaggaacagaatgtagattatacactggcgcttgtaatggaagacagtgaagaaaatgttctggagatcgataaggatattatctgccatacattacagggaaagccgatcaaacccaaaacccttgggcagaaaaaatatgtagatgcaatccgcaaacagatgatcgtcttcggacttgggcctgccggtaccggtaagacatatcttgcgatggcaatggcaatcactgcatttaaaaataacgaagttggaaggattattctgacacgtcctgcaatcgaagcaggagaaaaactcggattccttccgggagatcttcagagtaagatcgatccgtacttacgtccactttatgatgcactgtatcagatcatgggcgcagaaagttttatgaagaattctgaaaaaggtctgatcgaagtggcaccgcttgcttatatgcgtgggcgtacgcttgataatgcatttattattctggatgaagctcagaataccaccccggcacagatgaagatgttccttacacgaatcggatttggctcaaaagttgtcattacaggtgatgcaacacagaaggatctgccatccggtcaggtatcgggacttgatgtggcaacaagagttgtaaaagatatcgaagatatcagtatctgccaccttaccagcaaagatgttgtacgtcatccgctggtacaaagaatcgtaaaagcatacgaagattatgaaagcaaacacgaaaaccgtcgtggaaatgatgctaaatacaaaggaaaagataagaggcgaagatcatgacattatattttgaagaagaaggggatgtgaaacttccacttgaatgtgaagcacttgcaaaaagagtagtagaagaagccctggattatgtaggctgcccttatgaggcagaagtaaacctgctcctgacagaaaatgcacagattcatgagatgaataaggaattcagaggaatcgacagagcaactgatgtattgtctttccctatgatcgattatccggaacctggaacatttgacttcctggaagaacaagaagattgtttcgatcctgaaagcggagaactgacgcttggtgatattgtgatatcaaaagagaaagttcttgcacaggcagaagagtacggacacagtccgatgcgagaatatgcttttcttattgcgcattctgtgttacacttaacaggttatgaccatatggaagatgaagaacgccaggtgatggaacaaaaacaacgagagattatggaacgcctggatattctgagataacaattgatcttactaatttatacaaaatgatggagttaaagatgtatgtctgaacaacgtaaaaaaaatgagaagaatttcctcgtacagggatcgattctggcgatagcaggagttatcacaaagctgatcggagcattttaccgcattccgctgcttaatattatcggaacggaaggaaacggatactattctgtagcgttctcaatctattccgtggctttgatgttgacttcttacagcctccctttggcagtatcaaaactggtatccgcaagagtcgccgtaggagaatacaaaaatgcgcataagatttttcgtggagccataacatttgcattgctcgccggtggttttgtagctctgcttgtattctttggagctgattttattgcaacgacgatcatgcatctggatatgagtgcatatgcgctccgtgtattggcaccgtgtattctgatcgttgcattactcggagttttgagaggattttttcagggaatcggttccatgattccgactgcaatttcacaggttattgaacagatcataaatgcagttgtatctattgcgggagcctatgtattattaaatgcaggaaaagccgtaggaaaaacgagaggtgaccaatctttcggtccggcatttgccgcagccggaggaacacttggtactgttcttggagcattcagtgcattagtatttgttggtcttgtatttcttgcatataacaaagtcttcaaacgcaaaatgagacgtgaccattcgaaaaaacgcgaaagctataagacggtatacaaagttctgtttgtaacgatcgcaccggttattttaagtgcaactgtatataatatcagtgacttcgtagatacggcgctttttaataacgtaatggctgcacaggggttcagtaaaaaagaatatgcaagtcttttgggaatctttcagggacagtacagtacaatgatcaatgtaccgctttccatttccagtgcactggcggcatctctggtgccaagtttggttgcaacagtacagactggtagcagaaaacaggtacataataagatcaatacggtaagccgttttaatatggtgatcgcaattccatgtgcggttggttttatcacgctggcaaaaccgatcctgaatatgttatattttactcaggataatacaacggctgcactgatgcttcagatgggagctctttcggttgtatttttctgtctgtcaactgttaccaactctgtattacagggccttgatgacatgatgactccggtaaagaatgctgcaatttccctggtgatccatattgtgacattgttcctgatgctggtagtattgaaatggaatatctatgccgtagtattaagtaagattattttctccggagcaatctgtgtattgaacgcaaaagcactgcgtgacaggattggatatgtgcaggaaaagaagaagacttttgtaatccctgcactggcttcactgatcatgggtgtgatcgctgttttggtccacctgattttcgaattgttcgcaggcccatatattgcgacgatcatcgcacttcttgcagcagtggtaacttatggtgtggctattgttgtacttggaggaattacagaagaagaattacttggcatgccaaaaggagctacccttgtgacattatgccgtagattacatttgataaaaggggaatacaggtaagttatgagaccagtaaaaaagattgcactgttacacgatatatgcggtgtaggaaaagcagccatgatgaatatgacacctatcttaagtatgatgggaattgaagcgtgtcccatcccgactgtgttgttatcgacacataccggaggttatggaacacctgccatatatcatgtacccggagaatatatacgtacgtgtgcggatcactataagaaagaaaacattacatttgacgcgatttttgtaggataccttggtaatgttgacgtgattgattctgttatttattttatcagtcaatttccggataccaaagtaatccttgacccaatcatgggtgatcacgggaaatattattctaattttgatgaatcttacggtacatcgataagaaggcttttgccttattcggatgtaattctgccaaatctgacagaaatgtatctgctcgccggaaaagagtatcagatcacagggaatcaccgaaatgtcctgcatctgtgcgaagaactgcgcaaaatgggtgccaaagatataatcatcaccagtgttccgaaagatgactgcaaaaaaggtatcgtattatatgaagacgatgcatttctctatatcgggaacggtgaagtattaaaagaatttcacggagccggtgacgcatttgacggaatgtttcttgccagactcctgcagggtaacacacttctggaaagtgtccaggcttctcatgcattcgtatgtgcatgtatcagagaaagtgaaaagtatgattatccggagcgggaggggcttcttatcgaaaaaacattgagaaaaatcgtataaatacaatgttataagctaatactgtactcaaaaaggagtaatcactatgaaaaataagtatggtattggctttttaatgtttctgatccttgtagtatttggaattacctgtgcttatcagctgagtttgaataaaggaaagcgtgaaatccaggccgaaataaatgcgaaggaacagaaagaaatgaacaacacttctgtggcagcagacggacaggctcttaaagacgactgttattatctgaaggaattaaatggatatgtggttgtatatcttagtgataaaaagacggtatatgaatatacagatatttcactggaggaccttccggaaaatcttcaaaaagaaattcagaatggaaaatatatagaaacatcagaaagcttatatggttttctggaaaattattccagttaaacctgaaacttacagaaaggacaaaagataatggatgataaaaaagtagcaagaatcaatgaattatatcacaaatcaaaatcagaaggtctgacaccggaagaactaaaagaacagcagatcttgagaaaagaatatatagattcttttaaaaggaacctgcgtgggcagttgaacaacatttctataaaggaaaaagacggaagtattacgaatttaggtgagaaatttggaagcaaaaaaggaaattagacataagatcatccgtctcagaaaagagatggatccacttgtgtggcaacaggcaaccaacgacattaccgaaagagttatcaatcatccgcgatttttagaagagaccgatatatactgttatgcaaattataacggagaagtgggaacctcttccatcatggaggaggcctggaagctcggaaaaagtgtgtggtttccaagaattgagggaaacgaaatgaatttttacctggtagaaagtaaagatgacttacagccgggcgcatacgggattctggaaccaaccggcgatcatatagcagacggagaagacggacttttgatcatgcctggagtcgcttttgatgaagaatgccacaggattggatatggcggcggcttttatgacaaatatctggaaaaacatccgaatctgcatgcagttgcaattgcattcgaattgcagatgtacagagaacttccttttgaggaacatgatataaagccagagaaagttgtgacagaaaagcagagttatccgcttgatacagaagagaaaagtcttatataacaaaaaggagtgaacaaaagatggcaaatgggttaccgaaagatcctatgctgttacttagtgtagtcaatacaaaactcagagattattatcacaatctggatgctttatgtgatgatatgaatgtagaaaaagaagaaattgtgaatactttaaaaaccattgattatgaatatgacgaaaacagacatcagtttgtctaaatccatgattactaattgattctaaaataatacaaaggagcaaaaagaatgcttaataatgttaattacgatatagatattacaaaagagccgccggcggatgatactgcccgtcagtattatttcatcgaaaaggcaaaggcatatgtacagcgtgaatccgaagaacttggtcgtccgctgacgttctgcgttacaacctttggttgtcagatgaacgcgagagactctgaaaagctttgcggaatcctggaaaaaatcggttacgtagaagctgcggaagatgaggctgattttatcatctttaatacctgtacagtaagagaaaatgccaatatgcgtgtctacggacgacttggccagttaaaaccaagaaaaaagaaaaatcctcatatgatgatcggtctttgcggatgcatgatgcaggaaccggaagtcgtagaaaagttaaagacgagttatcgctatgtagatattatttttggaacgcataatatttttaaatttgccgaactcatcgtcacacgttttgaatcgcagcgtatggtgatcgatatctggaaagataccgataaaattgttgaaaaccttccgaatgaccgtaaattctccttcaaatccggagtaaatatcatgtttggatgtaataacttctgcagttactgtatcgtaccatatgtacgtggaagagaaagaagccgtgatcctgaggcgatcatatccgaaatccgccagcttgttgcagatggtgttgttgaggttatgctgctcggccaaaatgtcaattcttatggtaagaatctggaacatccgattacatttgcccagcttcttgaaagaattgaacagatcgaaggactggaacgcattcgctttatgacgtctcatccaaaggatctatccgatgaattgatcgaagtcatgggcaaatccaaaaagatctgcaaacatctgcatttaccggtacaatccggaagcagcaagattctgaagaagatgaatcgtcattatacaaaagaacagtatctggaactggtagaaaagatcagaagatcagtaccggatgtttctcttactaccgatatcattgttggtttccctggtgagacagaagaagattttgaagagacaatggatatcgtaagaaaagtccgctatgacagtgcatttacttttatctattcaaaacgtaccggaacaccggctgcagttatggaagatcaggtgcctgaagatgtggtcaaaaatcgttttgacagattattaaaagaagttcattccatcgcatcagaagtatgctctgttcatgaaggaactgttcagacagcattgatcgaatcagtcagtgaacacgatccatccatggtgaccggacgtttaagcaacaatctgctggtacatatcaagggagataaaggaatgatcggacgtctggcagatgtcagactgactgaatgcaaaggtttctattatctgggagaactggcagaataaatgtattataattaaccataaaagcgctcaaactatgtagtatcaacaagatagtgagggcgtttttatatgaaaaaaatcagtgagtatttatttttatggggtatcggaggatggatctactattcgctggaaatcatcttccgtggattttcacattggtccatgtttgtactgggcggaatctgtatgatgtttttcacgtaccagggagaactggtacactggcaggatgattttctaaggcaggtgctgcggtgcagtatctttgtaacagcaatggaatttatcacaggtatcattgtaaataaatggtttgcacttcatgtatgggattacagctgtatgccatttcagttattcgggcagatttgtctgccgtttatgatattgtttgcctgtctttgtgctgttggaatctatctgagtgccaatattctgcatttattatatggagaagacaaaccacagtttgtgagaaaaactatccttttaaattcaaaatataaatgttataatgaaatgtaaaaataaaatgacaagaggagaagaaaagtggcagaattaacaccaatgatgcagcagtatatgcagacgaaaaaagaatatccggactgcatcctcttttatagattgggagacttttatgagatgttctttgatgatgcactgaccgcatccaaagaactggagattacattaaccggaaaaaactgtgggctcgaagaacgcgcaccgatgtgtggtgtgccatatcatgcagtagacggatacctgaaccgactggtatccaaaggttataaagtagcaatctgcgaacagatggaagatccggcaactgcaaagggactggttaaaagagatgttgtaagaatcgtaacacccggaaccaacctggatactcaggcattagatgagacaaagaataattatattatgtgtatcgcctatgcatcagatcattacggcgtatcagttgccgatgtatcaaccggcgaatacatggtaaccgagatcgaaaattcagaaaaattatttgatgagatctacaaattcatgccttcagaactgatctgcaatgaagcgttctatatgagcggaatggattttgaattattgaaagaaaaacttggaattaccgtatattccctggattcctggtattttgatgatgcaatctgtgaacggatattaaaggagcatttccatgcagggacaattgaaggattgggtcttgccgactatgactgtggcgtgatcgcagccggcgcactcatgcagtatctggtagagacacagaaaagagatttatcacacatttctcatctgacaatctacgcagccggaaaatatatgcttctggatagctcgacgagacgtaatctggagttgtgtgaaacactgcgcgacaagcaaaaacgtggttcccttctctgggtactggataagacaaagaccgcaatgggcgcaagaacattacgcaaatacattgaacagccgttaattgacaaaaatgcaattgaaaaacgactggatgccgtagatgaactgatgaaaaatgcgatttccagagaggagatcagagaatatctttcaccggtttacgatctcgaacgactggtatgcaaaatcacatatcaatctgccaatccaagagatctgattgcattccagacttcacttgccatgcttccacatattaagtgtatcttaagtgacatgcagacaccgcttttaaaggaactgtatgaagagctggatacattggaagatctgtgcaagctggttagtgattctatcagggaggatccaccgatcgccatgaaagaaggcggtatcataaaagatggatataatgcagaagtcgacaaactccgaaatgccaaatccgacgggaaggactggcttgccaaactggaaacagatgagcgggaaaagacaggaatcaagaatctgcgtatcaaatacaacaaagtatttggctattatctggaagttaccaattcttttaaagatctggtaccggattattatacaagaaagcagactcttgccaatgcagagcgttatatcattccggaattaaaagaactggaagacacgattcttggtgcggaagataaactgtacgcactggaataccagctttattctgaagtcagagatacgattggaaaagaggtcgtacgtattcagaagacagccaaagctattgcaaaattagatgcatttgcctcacttgcactggttgcggagcagaataattacgtcagaccgaagatgaacgataaaggactgatcgacatcaaagacggaagacatccggtagtagaaaagatgatttccaatgacatgtttatttgtaacgatacatatctgaatgataaaaaggatcgtatttccattatcacagggccaaatatggccggtaaatcaacctacatgagacagactgcgctgatcgtcctgatggcgcagattggttcatttgttccggcttcatccgctaacatcggtgtggttgaccgcatctttacacgagtgggtgcatcagatgaccttgcaagcggccagagtactttcatggtcgagatgacggaagttgctaatattctccgtaatgcgacaagtaagagtcttctgatccttgatgagatcggtcgcggaaccagtacttttgacggtttaggcattgcctgggcagtgatcgagtatatcagcaacagcaaattgcttggggcaaagacgttatttgcaacacattatcatgaactgactgagcttgaaggaaaaattgaaaatgtcaataattactgcattgccgtaaaagaaaaaggtgatgatatcattttcctgcgtaagatagtaaaaggtggtgctgataagagctacggaattcaggtcgcaagacttgccggagttccgcagtcagttacggacagggcgaaagaaatcgtagaagaactggtgcaggcagatgtaaccggacgtatcaaggacattgaagtgcagggacaggaatcttccaaacaaaaaacaaagcattttgatgaggtagatcttgcccagatgtcattatttgataccgtaaaagacgatgacgtaattaaggagattaaagatctggatctagccaatctgactccgatcgacgcattaaatacattatatcagcttcagaacaagctgaaaaacaggtggtaaacgatgagtaaaattcaggtgttagacccgattacaattgataagatagcagcaggagaggtcattgaaagacctgcttctgttgtaaaagaactggtagaaaatgccatcgacgcaggtgctacggcaattgtggtagagataaaagagggcgggatttcctttatgcgcattacagataacggatgcgggattgaacgggatgacgtccgttctgcattcttacggcattcaacgagtaaaatccgttctgtagatgatctggtccatatcggttcactgggctttcgcggtgaagcgttatccagcatctctgcagttgcacaggtagaactgattaccaagaccagggaccagaccttcggaactttatatcgtatcgcaggcggcaaagaggaagaccttgaagataccggagcaccggacggaacgacatttattataaggcagttgttctataatactccggccagaaggaaatttttaaagacacctatgactgaagcaagtcatgtaggagatctgatgacaagacttgcactttcgcatccacacatttcttttcagtttatcaacaacggacagtcgaaattgcatacatccggcaacggcaaactcaaagatgtgatctaccatatctatggacgtgatatcgcagcaaatcttctaaaagcagaatacgatgcgaaaggtctgaaagtcacaggatttctcgggaaaccaatcatttccagaggaaaccgtaattttgaaaattattatgtcaatggaagatatgccaagaataatattatttccagagccattgaagacgcatataaagattttaccatgcagcacaagtatccgttcgtagtactgcatatcgagattgacggtgaacatgtagacgtcaatgtacatccaactaaaatggaactgcgttttaataaccagcaggaagtatataatgccatctactcagcggttgatcagggtcttcacgagaaagaactgatcccgcatgtggagatgccggaaccaaagccggttgtttccaatacaccgacatatgcgccgaaatcaaagactggatctgtttctcagaccccggcggcggtccagacaggagcaacatcaggaatgactggtggtgtaacatccgcatcgatgccgcaacagaaaaaagcaattgtgccgcctccgcaggagcgtgatctggaatacttcatgtccaggatgaaagaacgggttctggcagagcatgaagagaagaagagaaaagaaaagattgcaacaaagcaagcagtacatacgacagaaaatatagcagaaaatattttggtaaaagaaagcccgtcgttttcttctgcttcaacaccttcaaacgtagcagaagaaaaaacaccttacatgcagaacgcatccagcaaatcaaaaataacaatgtcgacgaatacagacgaaacaactaaaccagaatcgtctcttacggaaacgccgaaacagatggaactttttgaagatcatctgcttacaagagaggccatgcagaaatataaagtcgttggtcaggtatttgaaacctactggctggtagaatatgataacagcctgtacatcatcgaccagcatgcggcacacgaacgtgttctgtatgaaaagactttaaaatccatgaaaacccgggaattcacctcacagatgatcagccctccgatcgtactgaacttaagcatgcaggaagcagagcttctgaacacctacatggatcaatttacaaggattggattcgagattgaggagtttggtcaggattcttatgccgtccgcgccgtaccagataatctgttcagtattgcaaagaaagaactgctgatccagatgttggacagtctttcggatgaaattaccagaaatcagtctccggatctcatcgacgaaaagattgcttcgatgtcatgcaaagctgccgtaaagggcaatatgaaactgtcggtgcaggaagtagatgcgctgatcggtgaactgctatcactggacaacccgtatcactgcccacacggaagacctaccattatcgcaatgacaaaacgagaactggaaaagaaattcaagaggattgtataaaatgaagaagaaaccattagtagtactaacagggcctacggccgttggcaaaacaaaagcctccattggacttgcaaaagccatcggaggagaaatcatttctgctgactccatgcaggtgtatgaatatatggatatcggttccgcgaagatacgtccagaagagatgcaggggattcctcattatctggtagacgaattaaagccatgggacgaattccatgtagtccgtttccagcagatggcaaaaaaagctatggaacaaatctacgctaacggtcacattccaatcattgtaggagggaccggattctatatccaggcattactatatgacattgattttaccagtacttcacaggatgacaattatcgtcaagacctggaaaatctggcaaaagaaaaaggggcggaatatctgcacaatatgttacgcgaaattgatccaaagtccgctgaagatattcatgccaataatataaaacgtgtgatccgtgcgcttgaatattatcatcagaccggtcagaaaatgtccagacacaatgaagaagagcgtcagaaagagtctccgtatgaatttgtttattttgttctcaacgcaccaagggaacagctttatcagagaattgaccgacgtgtggatcagatgatgagcgaagggcttgttgaagaagtaaaacggctgaaagagatgggctgtaccaaagagatggtttcaatgcagggattaggatacaaagaaatactggcatatctggacggagagtatgctcttgacgaagcagtatatacaatcaaacgcgatacccggcatttcgccaagagacagcttacctggttccggcgtgagcggcaggtcacatggatccaaaaagaaaaatatgattatgacgaagaaaaaatcttagaagcaatgatttcacatctggagggaaaaatatgctaaagaaaaaactgagaggtaaatcaaagtttttgcgaaaaatgaatgaattaatggaaatttattcacgcaatcaggatacagcatttgcatatcgcgaacttctcggactggaaccgctgatcaagtatgagggagagagggccatgttcgatcttaacagagcttcgctcttatatgatatggaaagataccgagaagcggaaaatgtgcttcgccgcattccgtccatcaatccgacgtttgatgcgatgtgcgaatccctacggtttaaaattttagatgcaaaataaacagatgataaatttttcagaaagaaggataacagacaattatgataccaatgaacacaatttataatgaaatgggcattcgtgaaacagtcctttcatttggaaaaaatatagaaaaaaatctgaaagacagattcgaaaagatagatgagattgcagaatacaatcagttgaaagtaataaaagccatgcaggacaaccgtgtcagtgccggatgttttaattatgccagcggatatggttatgatgatcagggcagagatacacttgaaaaagtatatgcgtctatttttcacacagaaagcgcacttgtgcgtccgcagatcacttgcggaacacatgctctgtcactcgcacttgcggcaaatctaagacccggagatgaacttctggcacctgccggaaaaccgtatgatactttggaagaagtgatcggtatccggccgtcaaacggttcgcttgctgaatacggcatctcatattcccaggtagaccttctggcagatggcacttttgattatgaaaacatcaaaaaagcaatcaatgataagacaaaaatggtagcaatccaacgttccaaaggttaccagaccaggccgagtttctccgtaaagcagattggagaactgatcacatttgtaaaagggatcaaaccggatcttgtctgtatggttgataactgttatggcgaattcgttgaaacaattgagccaagtgatgtcggagcagatatgaccgttggatctctgatcaaaaatccgggcggcggtcttgctccgatcggtggatatattgcaggacgtgaagatttaattgatgcctgcggatatcgcctgacttctcctggactcggaagagaagtaggcgcatcgcttggtgtgatgaaggatttctatcagggattattccttgcgccgacagtatctgcatccgcattaaagggcgcaatttttgcagcaaatatttatgaaaaacttggtttccctgtaattccaaacgggacagaaagccggcatgatattattcaggcagtagaattcggaattcccgaaggtgtaattgaattctgcaaaggaattcaggcggccgctccggtggattcttatgttacacctgaaccgtggccgatgcctggatatgattcggatgttattatggccgccggtgcatttgtccagggatcgtctattgaattgagtgcagatggtccgatcaagcctccatatgcggtatatttccagggcggacttacctggccacatgcaaaactgggaattctgatgtctttagaatatctggtccgcgcaggaatcgtaaccttataaatttataaaaatctatgcagaaaaagaggatttgcagatgaagaaaatagcagtcattggcggcggtgcttccggtcttgtagctgcgattgcagccgcaagatcaaacccaaaagttcagattacgatatatgagcaaaaagattctgtcgggaaaaagattctcgcaacaggaaacggaaggtgtaatctgacgaacaaagatatgaaatcttcttattaccgcagtgaaaatattccatttgttgaagaagtgttagagcagtttgggtatgaagataccatacgctttttctcatctctcggacttatggtcaaagaaagaggaaattatgtctatccacattcagatcaggcatctaccgttctggaattattaaaactggaacttcaccggcttggcatcaaaattcttaccggtgttcaggtaacggatattaccccgatatcgtccggctttatgataaagctaaatacaggaaaacagaaagcagatgctgtaattctggcctgtggtggaaaggccagttcaaaactgggatctgatggcagcggatacacactggcaaagggcctgggacatacaatggttcccgtggttccggcgctggtacagcttaaggtcaggaaaaatccattcgccaaagcagccggtgtccgaaccgatgcttccgtaaccgcaatctgtgacgggaaagccattgcttctgaccgcggagaattacagcttacagcgtatggaatttccggaattcctgtatttcaaatcagccgctatgttgcgaaagctttatatctcaagcaaaatgcaaaggttaaaattgactttctgcctgagatgtcagaaaacgaatttttatcctttcttttagaaagaaaagaagggcgggagcaaatgacctgtgcggattatcttcttgggatcttccaccagaaactaataccgagatttttagagcaggcccgcatccgtatgcacacgctggttcaagagttgtccgaaacgcagttcaaaagccttgtgcaagcggtcaagcaaaacgtagtactaattgatactactaacggttttgacaatgcacaagtgtgtgcaggagggatttccactatagagcttagtgccaggacaatggaatccagatatataaaaggcctgtatcttacaggcgaacttctggatgcagatggaatctgcggtggttataatcttcaatgggcatgggcaaccggctatctggccggcaaggcagctgcggatacgcagtgatttttacaaagataacaaaaaggagtaaaacatgatacggatcaatcagttaaaattaaacattgcacatacacaatcagatctggaacgaaagattttgaaaacgcttcatatgaaaaaagaatatcttcagggatacaagatcagacgccagtccattgacgcacgtaaaaagccagatctttattatgtttattccgtggatgtcctggtaaaagatgaggcaaagatcaaaaaaagcatcaagagtaatcagattcaatttcaggcgaaagaagatacttataactttcctgcaaacggaaccagagagttcaagcaccgtcctgttatcatcggaaccggacctgcgggactattctgcggatatatgcttgcaatccacggataccggccaatccttctggaaagaggggccgatgtcgatcaacgcactaaagacgtagaaaccttctggaagaccggaacattagacccttcatcgaatgttcaattcggtgaaggcggtgccggaacattctctgacggaaaacttaacactcttgtgaaagacaaatcagggcggaaccacgaagttctccgcatctttgccagacatggtgctccggaagcgatcacatatcaaagcaagccgcatataggaacagatattttgtcccgggttgtaaaagaaatgcgtgaatgtatctgtgcgcatggcggagaagtacggtttcattcacaggtcactgatatccagaccgttacaacagggaacacaaaagtgctccgcaaattagaagtatacgatctcaaaaagcaggaaaaatatgttctcgatacagagcttgctgtttttgcaatcggtcatagtgcccgtgatacatttgccatgctgcaccaacacgaagtacctatgcagccaaaagcatttgcagtaggagtccgcatggagcatcctcaggaaatgattaataaagatcaatatggagagtattatccggactttctgcccgcagcaccgtataaacttacggcaaatctgaaaagcggaagaggtgtatatacattttgtatgtgtcccggtggatatgtagtaaatgcctcttccgaacctcatcgccttgctgttaacggaatgagttatagcaagcgagacggacagaatgccaataccgccgttatcgttaccgtaaccccggaagattttggaagcagccatccacttgccggcgttgaattccaaagaaaattagaagaaaatgcatatcgggaaggaaacggcaaggttccggtacagttattcggtgatttttgtaaaaatataccttcgcaaaaattaggtaatattattccacagataaaaggtatgtatcagcttgctaatgtcagacgcatttttcctgagatcattgcggattcattacaggaaggggtatgcatatttgatcagaagcttcctggatatgcaagaaaggatgctgtcatttcaggagttgaaagcagaacatcttcgccggtcagaatcataagagatgattctctgcaaagcgagatccgcggaatctatccttgtggagaaggcgcgggttatgccggcggcattacatctgcagccatggatggaataaaaatcgccgaaatgattgccggcacatatcgcccgttagagacaaaaaaataaaaattttttatgaaatatgctcactttatgtagaaaatcgaaaagaagtttaagaattttttaatatcataaacctatacactttttctgaaatgtgataaaatgtattgagttttttagataggaaaaacgaggaggagtacatatgaaaggtgcagggagtaagaacgcctgggctttatttctgcttattctggcaggagtagttcttggtggctttatcggaacgctggcaaaaggggtgccggccttatcctggctgagttatggacaatcctttggaatagacgagccgatcgtcctggacctgggagtgttagtcataacatttggtctgtcgataaagataaccatggcaagtatcattggcgtgattctttccattatcatatatcgtttcttatagtttacagaaaggtaggtccctgactttacttctgtgaacgtcgtgcgaatctaaagaaaatatgaatcaatctaataccatgagagaaatgccgaaagacgagcggccatatgaaaaatgtgcacgtctgggagcggacagtttaagtgacgttgaattattggcggtattattaagaacaggaactcagggtgaaaatgcagtagaccttgcaagaagggtcctgtatcatgccggcgaaaacggaatcctcgggattcaccagtttaatgttgaacgtttgaaaaagatcaagggaatcggtcaggtaaaagcaattcagatatcctgtatatcggaacttgcaaaaaggctttccaaagcttcatatgaagaaaccgtatgttttaccgaaccgaaaacgattgcacaatattatatggaagatttaagacacgagaaacaggaacatatgaaattattaatgttaaactcgaaggcaaagcttctcggcgaaaccaatatttcaaaagggacagtaaatgcatcccttattacaccgagagagctttttatagaagcattgcagaagaatgcggtatcaattataattttacataatcatccaagtggtgatccgactccaagccgtgaagatatgttgacaacaaaaagaattctggatgcgggtgcgcttataggaattgatttgttagatcatattattattggcaataattgctatatgagttttcgtgaggagggcatgctgtaaattctgcaaacaagatagaagaaaggattctgtcagatggcaagaaatgtatacgggctggaccttggttcttatgatataaaggtctacgataagaaaaaagatacgatctggaaagagaaaaatgtaattgcatttaaagataaccgggatcgcgatatttttgcagttggagatgatgcattcagtatgtatggaaaagcaccatccaatatagaaatcacatttcctatggaagcaggtgtcatttccagatttaatgacatgcagttcctgcttcagaacctgttaaaaaggggacgtcagttttcgcgtggttctgaatatgtgattgctgttccaacggatgtaacagaagtagaaaagaaagcattctttgatctggtaatccattcaacggcaaaagcaaaagaagtaaacattgtagagcggtctattgctgatgcagtaggtctgaatcttgatattcagaatacaaaaggtatcatgattgcgaattttggaggcgaaacaaccgagttatctgtactggccggtggaggtatggttttaaaccgccttgtaaaggtcggcggtctgacgtttgaccaggggatcatcaatcttgtaaaacacagtcacgactttttgatcggacggcagacggcagaagtacttcgaagaaatttcaatgtatttacgggcgattccgattctatattatcggtggccggaagagatttgatcacaggtgtaccgatgcgaaagcctatttctattatgcttgtccgtgcggcaatgaaggatcctctgcttgaatgtgtaaaagcaatacattctcttttagacaggacacctcctgaggttcgcaaagcaatttatgaaaacgggattttcctcacaggtggacttgcaaatatgccaggcctcgaaatatatatcgagcagatggttggaatcaaatcaaggacagctctggaaccggatacctgtgcggtaaatgggctgaagcgtattattatgtcaaaagatttgagaaaacttacattttcaatgatagaagataattataggtggatgagataatgaagacaaaaaatcaatcttcccttccaagtaaatactggctgatcatcgtaatcgtcatctgtgttattctgatgggggtagaacgtattaccggagggaacggaccaatcagtttcattgcaaattatacagtaattcctatgcaaaaaggtatcggatatgtaggacgttatatgagcgatctttccgataattttgagacactgcaggatatgaaaaaggaaaacaaaaaattacaatccaaagtagatgatcttacaatagacaacaccagactccgtcaggatcagtatgaactggaaagactccgtgaattatataaactcgatgaaaattattcggattataaaaaaatcggcgcacatgtaatttccaacagcggttctaactggttcagcgactttacgatcgacaaagggagcaaagacggaatcaagaaaaactgtaatgttcttgcgggcagcggccttgtgggaattgtaacagaagtcggacctcattacgcccgggtacgttctattatagatgatgaaagtaatatcagtgcaatgcttctttctacttcagatacctgtgtggtaagaggtgatttaaaacagatggaaaatggaagaatccgttttgaaaagcttgctaataatgataataagattgaagttggagaacaagtcgttacttcgcatgtcagcgacaatccattttcccattttttcaagagctactacccctttttgaatcgctgctgtaattccctgtacggataactttgaactctttccagttacctgaaggactgcttttccactttctgccgatgcctgtgctgactttcttgccctctggactgctcttgctttctgcaccgcctgaaagctcttttccacctgctgtttctgcatggatgcctgtgtctttattttctcctgagacagaccggatacttttaccactctgctgtttctgcatggatgcctgtgtctttattttctcctgagacagaccggatacttttaccactctcggtgctgcttttacctgccgtttaccattctccttggcaagtgccgcctgctctggtttcagcttgattaatttctttccgctttctgccccctgcaccattgcttcttcctgtctgctttttctttcctttatcttcctgtaggtcactccggccccttattataataaaataagtgtagatgttagagttaattcctctctaacaactacacttttatggtactaaatggcaagtgcgtaaccgtagtggccttcaccgggttacacttccgggcattttatttattaacattcgctgccagtcacgacttgaaggaaacaataccgggttacacttccgggcattttatttattaacattcgctgccagtcacgacttgaaggaaacaatagataaggattattgtgaatgtggaatgctgttagaaacagttagagagtcagaagcaccgttaaaggaacgaagcgaacgtgtttgaggcgaacgccgagtttaagcgtagttcctttgcttttaggtgattctgactctcttagtggttcttatggtatggaacctgaacaagaagccttatctattgtttccttcaaggactgagaggccgtttttcgtacacttccggtatcacaaaggttacggttcctctgtttaattattatggcatgcgaaacctcaggaataaaattacaaggtcccagccgccatgatgcattaaatagaaaaaagtgggcatacttataagaaaatgaaaggaatgcacccactatgtcatcaaaaaagaaaaccccaatccacctggaggaccttactccagatgaaaaagtaaaatatgagattgcggaggaattaggccttctagaccgggtgatgcaggatggatggaaatcacttacatccaaggaaaccggtcgaatcggagggttgatcacgaaaaagaaacgggaaaatgaaaaaaatgacaaaagtattacgaatgttaattagtgtgaagattgtgtaataaaggttgaaaagggaatatccatttgctataatcgaaaaactgggaaaagagttagcaggtgaggatatgaacgaaaagattaatgttttagatgtgaatatagacagctgtacagcaaaagaagctatgaaagaaacgatagcttttctggagtcaggacctgtaagcgtgatagatgtggtatcggtagacggtcttatgcagatgaatgatctttcggaacttaaggccaggatgaatgaatttgatcttgtgctgccgggggaaaagctgattcttgaagcagcagaagaagcgaggctgccaaaggaaatcgatataaaattatatctgaagatgtttatgcgttatttgcataagaatcataagagaatgtatcttctggtcgaatcggaggaagatggacaggaagcatttcgctatatgcagagaacctacagtgggattcagctggtaggtcttgcaaaagtatcagcggagggaagggcagacgacatgttggtcaatgcgattaacggaagtgaagtggattgtattctttcggcattgtcagtaccgttacaggaagattttatagcgaaaaacaggaatctcttggatgcaagagtatgggtcggcgtcgggaatagaatgttctcggatcacaggcagggacttggtcatgggaagctggcaaaatttctgttgaatcatatatttaagcgtgaaatggaaaaaaataagctaaaaacaaaatcctaagaaaaacataagaaatatgtttcgtcactatgtctatgggataaatgtgaataaattgtaaaaaaactgaggaaattaccaaaaaagtgtgatttcctctttatttttttggtcatatatattaagataagatttgacagtatacattttggaaatttgtagataagatttgttgtggaaaatgtatattgaaaagagtggaggagatggaatatgatatctaatcaaatacttcaaaacacaattgaaggattgaaagggattacacgaattgacttttgcgtgatggacacagacggtaaatctcttgcaagcacattttcagaacaggagaactatgtagaggaggttatctcctttgtagaatccccggcagacagtcaggtcgtacagggatatcagttttttaagatttttgatgaacatcagttagagtatattcttcttgccaatggaggaagtgatgatgtttacatggtaggtaagattgcggccttccagattcagaatcttcttgtagcatataaagaaagatttgacaaagataattttatcaaaaacctgctgttagataatctgttgctggtagatatttacaaccgtgctaagaaattacatattgacacagaagtaagacgtgttatctttattattgaaacaaagcacgaaaaagatacgaatgcgctggataatgtaagaaaccttcttggtaatcgtaccagagattttgtgacggccgttgatgagaaaaatatcatcgtggtaaaagaactggagccaaatgatggacatacagaactggagaagattgcggagaatatgtatacactcctgaaagaagacggagaagaagatgttctgatcgcatacggaacggttgtaaatgatatcaaagaagtatcaaaatcatataaagaagccaagctggcacttgatgtcggaaagattttctttagtgagcgaagtgtcatcgcatatagtgctttgggaataggacgtctgatctatcagcttccgattccgctgtgtaagatgttcatacgtgagatttttgaggggaaatcaccggatgatttcgatgaggagacattgacaacaatcaataaattctttgagaataatctgaacgtatcagagacatccagacaattatatatacaccgtaatacactggtatacagactggacaaattacaaaagagtaccggtctggatctccgtgtgttcgaagacgccattacattcaaaatcgcacttatggttgtgaaatatatgaagtatatggagtcactggagtattaataatcaggaggaacatatgattgaactaagagaagtaacgaaagagtactcaaaaggggttgcagccctgaatggaatcaatctgaagattgaacagggtgaatttgtgtttattgtaggagacagcggctctggtaagtctactttgatcaagcttatcatgaaagaactggaacctacttcgggaacgattattgtaaatggcaataatttaagccgtatgaaacatcgcaaagttgcgatgtacagaagaaatatcggcgttgtatttcaggatttccgtttgttgaaagacagaaatatttatgaaaatattgcgtttgcgcagagagttacagagacacctacaagaattatcaagaaaaaagtaccggcggcactgtcactggtagggcttgcccagaaatacaaagcatttccgaaggaattatccggtggtgaacagcagagggttgcgattgcaagagcgatcgtgaatgaacctgctattcttctggcagatgagcctacgggtaacctggatccgacaaactcatgggaaatcatgaagttattggaagaagcgaatgacagaggaactacagttcttgtcgttacgcataaccaggagatcgtaaatgaaatgcagaagcgagttgttacgatgaaaaagggtgtcatcgtaagcgacgagaaaaaaggtgggtataagcatgagaattagtacaataggatattcgatgaaacaaggggttaagaacatccgcagaaataagatgttttccgttgcttcgatcgcaacgatggcggcatgcattttcctgttcggattgttctattccattgtagttaactttagttatattgtagaaaaagcagaagaaggtgttgctattacagtattttttaatgaagatactacaaaagaacaaaaagatacaattggtgcccagctgaagaaagaagatggagtactgaaagtaaattatgtaagtgcggatgcagcatggaataagtttaaagatcagtattttggagaatcaagtgatctggcagaaggatttaagagtgataacccgcttgccaattcagataactacgaagtatatctttcagacgtatcaaagcagaaagatgtagtgtcttatgcaaagtcgctggatggggtgcgtaaagttaataaatcagacgtagtagccaagactcttaccagtgtgaacaagttggtgggatatgtatcggtagcaattattgcaattcttctggcagtgtcaattttcctgatcagtaatacggtcactatgggtattacggtaagacgtgaagaaattgcaattatgaaatatatcggagcaaaagacggatttgtccgtgcgccgtttgtaatagagggtctgatcatcggagctgtcggagctgtaatcccgctcgtattgctttattttatgtatgataaggcaattacatacattatgacaaaattcagccttctgaataatattgtagatttccttccggtagcaactgtttacagaacattacttccaatcggaattgctttgggtgttggaatcggttttgtgggaagtttctttacaatccgcaaacatctgaaggtataaaagttctggctcggaaaggagcgtcatatgataaaaagaaagaagatgataagccttctgctggtgcttacgcttgtaagcggaatgtttgtgcagacatatgcaacagaaattgatgatacaaagaaaaaagcagaagaactggaaagcaagaagaaagctgctgaaaatgagaaaacatctctggcagatcagctgaaaaagctgacgggcgagatggaagaaactaagaaaaagatttctgcaaaagaagatgagatcacaaataaagaagaagaattgattcttgcaaaagcggatgagaatgaacagtatgaaagtatgaagaagagaatccgttatatgtatgaaaatggaaatacaggatttgtagaaatcctttgctcttcaaagtcaattggagaattgttgaataatgctgaatatatcagcagaatatcaggatacgacagaaacatgctggtagaattccagaaggttgtaaccaatgtcgagaatcaggaagcagaactcaagaaagaatataaagaactgcagacgatgcaggataatctgatcacaaagcaggacagcgtaaatgaactgataaagaataagcaaagtgagattcagagtttgaccagcgaactgggagatacaaaaaataagcttgcacagctggaagcggcagctgccgaagccgaacgtaaacagaaagaagcagcagcggcagcggcagctgcgaagaaggctcaggcagcagccaaaaagaatacaagctcatcggggtcttcggccggttccgccggggcatcggtggtgtcgggaaatggaacatttacacatccttgtccgggtggatatatttcgagtggatttggttacagaacacagccgattgcaggtgcaagtacgaatcataaagggattgactttgcagcagcaacaggaacgccaatctatgcggctgcggcaggaacagttatttcagccggatatgccggaaatgcgggaaacctgttagtaatcagtcatggaaacggattgcttacatattatatgcattgcaatgcgatttatgtgagtgcgggacagaaagtcagcagaggtcagaatgttgcagcggttggaactacaggaaattcaaccggaccacatctgcattttcaggtaatgttgaatggaacaccggtaaatccggcaaactatctgtaagaaacgaacagatcatagtatgaggcaagataaatgaaaaacagaaaaagttttttgaaaggggcgctttgtggcgcccttgctatgttattagtggcaggactcgtgtcctgtggattaaaagtgaataatggaaacagtgatatcacatcaaaaacagaagataagatatcagaactgcagaacctgatcgagaagcattatatgggggatgtaaaagaaaagaatctggaagatggggtctataaaggttatatcaatggcctgaatgatccgtattcggtatattataacaaaaaagaaacaaaagaattatacgaatcaactggtggtgaatattccggaatcggtgctgtgatgtctcagaatacagagacaggagtgatcactctggtccagatatataaggattctccggctgagaaagcaggacttaaggcgaatgatatcctttataaggttgaaggaaaagaagtcacaggaaaagatctctctaaagttgtaagtaaggtaaagggtgaaaaaggaacaacggtagaactcaccgtattaagaggtgaagatgccaaagaagtaactgtgactgcaacaagagataccgtacaggcacagacaattgagtataagatgatggatgacaagattggttacatcagagtgtctgaatttgatactgtgacgtatgatcagtacaaagaagcattggatgatcttgaaaaacagggaatgacaggtctagttgtggatctgcgtaataatcctggaggttcgctcagtacagtatgtgatatgctggatctgatgctgccaaagggcctgatcgtgtatacggaagataaaaatggcaaaaagacagagatgaaatctgacgaagaacatcagtttacaaaaccgctggcagttctggtaaatggcaacagtgccagtgcatcagagatttactccggggcaatccaggattacggaatcggtaagattgtcggaacccagacatatggaaagggtgtcgtacagcagatttttgatctggatgacggaacagccgtaaaacttacgattgcagaatatttcactccaaagggaagaagcatcaacggaaaaggaattacaccggatgtaaaggtcgaatacgaaaataatgaagaaaatccggatgcagacaatcagcttgataaagctgtggaggaagtaaaagcacagatgaagtaatcgtttgtggatggtgacatagcaaaataagagttttgaagggaatgcagtttggcattcccttttattatgccttatggtaaaatataaacaatatgaaatttagattatgtatataaggtaggaggaaaaaacattgattaatcagttagtagccaacataaagaagacaggagcaccgattgtagtaggattagatccgatgttgaactatattccggagcaggtacagaaaaaagcgttcgcagaatatggtgagacactggaaggagcagcagaagcaatctggcagttcaataaagaaatcgtggacaagacttatgatctgattccggctgtaaaaccacagatcgcaatgtatgaacagtttggtcttccgggacttgcagcattcaagaaaacggtagattactgtaaggaaaaaggactggttgtcatcggtgatattaaaagaggagacattggttctacatcagcagcttatgctgtgggtcatattggtaaggtgaaagtaggcagcaagacatacgcaccatttgatgaagactttgtaacagtgaatccataccttggttcagacggagtgaatccattcctggacgtatgtaaagaagaaaagaagggaatcttcgtacttgttaagacatcaaatccgtcaagcggtgaattccaggatcagaagatcaacggccgtccgttatatgaactggttggagaaaaagttgccgcatggggatctgaagtcatgggcgatgagtacagctatgtcggagcagtagtcggagcaacttatccggagatgggaaaagtattaagaaaagtgatgccaaaagcttacattctggttcctggttacggtgcacagggaggaaaaggaaaagacctggtacatttcttcaatgaagatggccttggagcaatcgtaaactcttccagaggaatcattgcggcatataagcaggagcagtatgcaaaatttggagctgagaattttggtgatgcatccagagcagcagttgagacgatgatcgcagacatcaagggagcacttgagaacagataatgtctgaacagacgaaaaaaagactgataacgaaaaaagtaagacagagtaatcttgacaggagataaaggaagatggagagaaaaaaagaacaggcgaaagttctgtcacaggagatgctggcagatggaatctacagtctgtggattgagacagaaacagcgctgactgccagaccgggacagtttgtgtctgtatacacgacagatgcaagcaaattacttccacgcccgatcagtatctgtgaaattgataaagaagcaaaaagattaagactggtatatcgtgtgacaggagaaaagaccggaacaaaacagttttcagaattaaaggccggagattttgtaccagtgatcggacctttgggaaatggatttccatatgaaaaggcagaaggaaagaaagtattcctgatgggcggcgggattggtgttccgccgattctggaacttgcaaagcagatgcagtgtgaagaaaagcagattgttgtcggctatagagatgcgcatacgttcctgaaagaggagtttgaacagaacggaaccttatatatttccacagaggatggaagcgtgggaacaaaaggaaatgtcatggatgctatccgtgagcagagtctggatgccgatattatatttgcatgcggacctacaccaatgctgcgtgcgatcaaggcctatgcagaagagaagaaaatagaatgctatatttccctggaagagagaatggcatgcggtatcggagcctgtctggcatgtgtctgcaagacaaaagaaaaagatgcacacagtaatgtgaacaataagagaatctgtaaagacggaccagtattcttatctacggaggtggatttataatggacatgaaagtaaatattgccggcgtagaatggaagaatccggttacagtggcttccggtacatttggttcgggagaagaattcagtgagtttgtggatctgaaccgtcttggagcggtaacgaccaagggcgtggcaaatgtcccgtggccgggtaatccgacaccacgtgtagctgaagtttacggaggaatgatgaatgcgatcggactccagaatccgggaatcgatctgttctgcaaaagagatattccatttctgaagaaatatgatacgaagatcatcgtcaatgtctgtggtcatgcaccggaagaatatctggcagtggtggaaagactggctgatgagccgattgatatgatggagatcaatatttcgtgcccgaatgttaatgcaggctttctggcgtttgggcaggatgcaaagcatgtagaggagctgacggctcagatcaaaaagattgcaaagcagccgatcatcatgaaactgacgccaaatgttacggatattacggagattgcgaaggcagcagaagccggcggagcagatgccctgtcattgatcaatacactgacgggtatgaagattgatatcaaccgcagaacatttgcggtagcaaataagaccggcggtgtgtcgggaccagttgtacatccgattgcagtccgtatggtatatcagacggcacaggcagtgaacattccgattattggaatgggcggtattgcgacaccggaagatgccattgagatgatccttgcgggagcgtctgcagtatctgtaggaactgcgaatttctataatccgaatgcaacgatcgagattattgacggaatcgaagcatatatgaagaaaaatggatttgaatccgtgaaagatatggttggcattgtaaaataaataaatgataaaaatgcatcagtacaggtcaattccctatattgatgcatttttgcgcttcatctcagaagtgcaaatagcacaataaaaatatgaccgttcgtcagtttttgggtagattttcagaagtgtttttgttatactaatgtctatatgacaataacaaaggaggattagtggatgaagaaatcatttcagattttcaaaagagatcttggccggttgttccgtaaccgtgcagcagtactgatcctggttggaatcagtgtgctgccgtctctttatgcatggttcaacatcgctgccaatatggatccgtatggaaataccaagggaatccaggttgcgattgccaatgaggataaaggtgccgacagtgagcagatgtcactggacgcaggacaaaatattgtagacaatctgaagaaaaatgaccagcttggctggaagtttgtagatgcaaaagaagcgaaaaagggagtgagatccggaaaatattacgcagcgatcgtgataccggataatttcagtgaatcacttctgagtattttatcaggagatatcaaacagccgaagctggattattatattaatgaaaagaaaaatgcaatagcaccaaagatcacggatacaggtgcaagcacgattcagcatgaaatcaatgatacattcacatccgtagctgcagagagcatttctgaattattgagtaaagaggccggagaattatccggaaaagtaagtgaaggaaattcaagtctgatcaaagctatcgcagataccagaaagaatctggacgaatataataaggtattggaaaacttccagaagacagtggataagtcagatgagatcatggcgagtgcggtaagtacgctggatcaggttacggttactgcagagtcaggagccaaagcaatcgaagacagtggaaatgtgcttgcagataccagaacagcggttggacagttttcaacagaattctccaatgggttatcgaacggagagacacttttaaatgacacgtatgtctcggcatcggcaaaactgggcgtgtttgagacgaaagccggacaggcactgacagcagtagacaacagcctttcaacggcttcgtctctgctggataaaaatcaggaacttctggaacagctgaaagaattgaatgataagattcaggggcatacagaactgggacaacagatatctgctgtaatcggacagaaaattacagaattggagaaccagaatgcatcgttacaggagctggtatcttcactgaaaacagggaatcaagggattcaaaacgcagtgacaacagcaaagaatacacgtacttcactggaaaaacttgcgaaagaaagtaaagacagtctgcaaaattaccgtaccaatctggatcagaagattctgccacagctgaatcagtcactggacagtatggcttcactgagcggaaatctttctgcggctttaaccggagttgagccgacagtagaacaattaaagacgattttaaatcagttaaatgacagcctgaaaagcagtgcgtctgcattgggacagacaggagatgtgttaacacaggttgatgaggcactggcatctgttcagacggatttaaatgcattacagagttcagagatgtatcagaaactgacttcactggaaggacttgatgcggattcaattgcagattttatgtcctctccggtgagcatcaaatcaaatgtgttatatgatgtagaaaattatggctcgggaatgacaccattttacacaaatcttgcactttgggtaggaggactgattctggtatcaattctgaaacaggaagttgataaagatgaaaaggtacggaagtttacagccggacaggcctactttggaagatggctgttatttgttgcagtaggtcttgtacagggactgatcgtatgtgtcggtgatattttattgttgaaagtacagtgtgtacatccggtagcgtttgtatgtgtgggtgtattctgttcgtttgtttatgttaatctgatctacgcactggcattgacctttaaacacattggaaaggcactgggagttgtacttgttatccttcagattcctggatcggcaggaacgtatccgatcgagatgacaccggcatttttccagagactgcatccgcttcttccattcacatatggaatcagtgccatgcgtgaatgtattgcaggaatgtatggagcaaatatctggaagtatctggggattcttgcgatatttttcccaatctctcttttcatcggtctggtattacgtccgttgcttatgaacctgaatcacttgttcgataaacgtctgtctgagacagagttaatgcttggggagacggagtcggccgaacggaaacgtccggaactgacaatgatgatgaagacacttatggaagatgctgaatggaaacaggaatttcttgtgaaatccgaaaaatttgaaaaacgttatccaaagatgatccgatggggattccttggaatgatcatcataccactggttttcctgatactgatgttcagtctggagtcaaaactggtcttcctgatattgtggatcgtatcgctgatcggacttgcagtatatctgatcgttgtagaatatctgcatgacaagatgcaaagacagcttgctatgacaggtatgacaacagaagatctgatccatgagataaaggaggaaagaggcgaatgaaaaatatatgggaaatcttccgaagagatataaagcgtattaaaaataatgtaatcgcaatgattgttatcatgggaattacagttgtaccatgcctttatgcgtggttcaatatagcagcaagctgggatccgtatggcaataccggtaatctgaaggttgcagtcgcaagtgttgatgaaggatatgagggaagcctgattccgttacagatcaatatgggagatcaggtactgacatcgcttcgaagcaattcgcagcttgactgggtttttaccggaagaaaaaaagccatagacggtgtaaagtccggaaaatattatgcagcaattgtgataccgaaggacttcagctcaaatatgatgagtattttttctgaaaatatccagaaaccaagtatcacatactattcgaatgccaaggaaaatgcaatcgcaccaaaagtaacggataaaggagcaagtgcgatccagagacaggttaatgaggtatttgtagagacgatcagcgatactgtgatcactgcgtttaaggcagttacgaatgtagcggatcaggacggagtggcagcaatcgcacaaaatcttgcggataatttaaatcagatcggctcggatttgagtgcggcatcgtctacattaagctctttttcgggaatgacaacttctgcacagcagcttctggatacaacaggaagtttcctgaaggaaacacaggagcattccaagaacacgacagattcactgaaaaaggtgaaaaaatcgttcagtggaattgatgagacaatcagcggtgcgacagacggagtaaatgcggcaattaattccggaaaagaattctatgatcagatgtcggaaattattgattcagcattttcatcaaactctcagagcgcggatgatgtggcgggaacattgaataccctggcatccagagttcagaaagtgattgattcctatacttcgctgaaatcggcaatagatgaaataaacgttggaaataatgcgcagttgaatgcattaaagggaagtatttccggaaaactgggagagacgattgcgacacagacagagcttcgggataagcttaagtccacagcatcttcgcttcagggagcggcagatacagcagtaacagataaagcagaattagataaactggtgaaatcaagtgcagacagccttgccggaatcaagacagactttgagaagaatgtaaagagcagtctggatgaactgggagattcgatgggagacacaagcagtaatctgaaccttttgatggatcgcctggatgaaggtgtagacggggtatatgatttgtcaacttcagcgtcggctgatctgacacagattaacacagcgctgaatcattcttgcaatctgctcaatacagcagcagaaaaaatcagcaatacgacaggaaaaatcggagaaatgcagcaaagcggtgatttctcacaattagaagaactgatctccggggattctaatgtgatcggagagttcctggcagcaccggtaagcctgaagacaaatcaggtctataagattgaaaattatggttcttcgatggcaccgttctattccacactgtcgatctggatcggtggaattgtgctggttgccatgttaaagacaggcgtttcgtcaaaatgcaccgaaggtcttaagaaagtaaaaccgcatcaggaatacctgggacgatatctcctcttcctgatcgtaggtctcctgcagagtaccctgatctgtctgggggatctgttatacctgggaattcagtgtaagcatccgttcctcttcatgctggcaggatggttctcgagcattgtatatgtgaatatcatctatacactgacagtatcattcggagatatcggaaaagcggtcagcgttgtacttctggttatgcaagtggcaggttccggaggaaccttcccaattgaagtcgcaccggccttcttcaaagccgtatatccgttactgccattcgttcacagcatggcggcgcttagggagacaattggcggtatgtatggtatgacctactggacagaacttggaaagcttggaatctttttgatcctgtccctgatccttggattgctccttcgtaaaccggtgatccggatgaatgaggcatttgcagaaaaactggaagagacgaagatcatgtaaagcgaaagtacagagaagttgccactggcaacttctcttgcatactttggtatataagaaatacaggcagtgacagtttttctgtatgcgtgaattgaaaaagtgattttcttatgataaaattaaatggaattatgatgcaataataagacacacagcgtctgaaatatatggaggtaatcaaaatggaaagttataagcaggagtttattgaatttatggtagagagcgacgtgctcaaatttggagaatttacattaaagagtggaagaaaatccccgttttttatgaatgccggagcctacgtaacaggatcacagcttaagaagttaggtcagtattatgcaaaagcaatccatgatacatacggagatgactttgatgtattattcggaccggcctataagggaattccgcttggagttgtaacagcgatcgcttacagtgatctgtatggaaaagaagtacgttactgttctgatcgtaaagaagagaaagaccacggtgcagataaggggagctttcttggaagcaaattaaaagatggagatcgtgtgatcatgatcgaagatgtgacaacatcaggtaaatccatggaagagactgttccgaaagtaaaaggcgcagcagatgtaacaatcgtaggtctgatggtatctctgaaccgtatggaagtcggaaaaggcggcgagaagtgtgcgttagatgagatcaaagatctgtacggattcgatacagcagcaatcgtaacgatggaagaagttgtagaatgcctgtataacaaagaatgcaatggaaaagttgtgatcgatgatacattaaaagcagcaatcgacgcatattatgaacagtacggagcaaaataggaacgggggagaacacgagtatgaatgaaaaagcatataaagcaatgggattagccggtgctgcaggaattgcagtgggtattgttgttacagtagtaggaatcgcagcaggtgtgatctctattatcagcggtgcccgtttactgaaagagaaaaaaggaatacttttttaataccgaagagatacgggaggttgtaggacattggattcaaagaagcgaaaaagaatccggatactgggaaagatattatttatattatatgtaatatttattatatatttccttctgttctctgactggtatggacgtacgggggagatgcgggaataccactacaatctggtattgtttaaagaaatcaaaagattctggcagtaccgtgagcaggtgggattctttgcaatgttcactaatttatttggaaatgtactcatatttgttccatttggatttttccttccgatgggaagcaggcaaagaagctttttcggtacagcattttacagttttggactgagcctttgtgtggaagtgttccagtttatcacaaaagtcggaagctttgatgtagatgacctgttactgaatacgatcggaggaatctgtggatatatactatttgtaatatgtgcggcaataaggagaagacatgctgggaaaaaaactaagaacagaagatgacagaatcaaagcggcagcgaaagcacgcaagaaaaagcgtaaaaaaatgatcaaaacgaaatatggacagaaagcagtcagacactccaaaaggggtgtctattcctgtacttatgcagtagtgattgccttcctggtgagcgtcatgatcctcttttcgtttatgaataaaggaaatgtaaatatattaatgggatttttcggactcggaacctgtgcgatggcagtgatcggaatctggcttggcatcaagggattcagagaacgcgaaaagatctatacgacctgcaaggtgggaatcacagtaaatgcggtattccttgttgctatggttgcattatttgtcagggggcttatgtagatgatagaagaaagatatgagctggcacttgaccgtatccgtctgatgcagacagaagatacggttggggagccttacaaagactattttaagaagatggcagagttcgtgcttatgctggacgaactgagaacagaacttctggatggcagataccagaagcttgaattagatgaattaagaaaatggaatagacggctgtatcaggatgttttgccggggcagtatgagaaaagttatgcgaatccggattatgcgtgtaagatgctaggaaaagaatcgggacagattctgggaatgttatatgcggaacttcgtggggcagtcgtttatgtttttgaaggaaagacagaatatctggcaatcctgtatgaattgttgatcgaggtatacaaccagttcgaagaagaaccggatccgaaggctgtccgggatacgttctactggtatgccagtgattactgtgatgtattccttgcggaccgcatccgggagcaggttttgccggaggagtcatttgcaacagatctgatcatgaacagtgatcttacagatcttagatatctgtatcagtttggagagtacatcagtgaaaatgaatggaagacggcagagcatctgaacagtcttccggaagagacgatccggaagatggcagatgtctatacagaaggataccgcatcggattcgtgaatacgggaaaagacctttcgaagaaatcagtggtaaacatccgttacattcttggattcgagcgcgtggtgaaaaaagcaatcgagaattttgaaaaaatgggcttaaaaccggtcatctaccgtgcggcagtcagtgtgctgacaaagagacagcatattaagatcggatattatggagcagtggcgaacaagcagtatgaatatgatcacaaagatgaccaggcactcttcatggataagaaatatctggagcgtaaactggaagtgatgcagacgacttacgagcatcataagaaagaagccgccggattcgcaggaccggcatgcatcgatatgttcggagaagagccgtttgaaccggaagcaaaagagacagtcgcaaagctttcaaagagtcaggaagagatgatccttcagtatgacagccgccagagccagatggtgaaccagtatatcaagggagaagaaagaagctttacgatcattgcctatcctgtaccggagatcggagagaagtacgaagaaatcttcgacgagatcatacgtatcaatacgctggatgccaaattatatgagaaagtacagcagacgttgatcgatgccctggatcagggagaatacgtacacattctcgggacaaatggcaaccgtacggacctgaatgtacagcttcatccactgaatgatccgaaaaaagagacaatttttgagaactgcgtggcagacgtaaatattccggtcggtgaagtatttacctcaccggtactggaaggaacgaacggagtcctgcatgttagcaaagtctatctgaatgaactgcagtaccgtgatctggaaatcacattctcgaacggtatggtatcagaatacaactgtgcgaattttgaacgtgaactggagaataaagcatatattcatgataacgtgctgtacaagcatccgacactgccgctcggtgagtttgcaatcggaacgaatacaaccgcatacgtaactgcgaagaagtacggaatcgaagataagatgccgatcctgatcgcggagaaaatgggaccacattttgctgtgggagatacctgttacagctggtgtgaggatatcaaagtctataacccgaacggaaaagagatcattgccagagacaattcggtatcgatccgcagaaaagaagatgtgtcaaaagcatatttccattgccatacagatattacgatcccgtatgaagaactgggcagtattacagttattacaaaggataaaaaagagatcacattactgaaaaatggaaaatttgtacttcctggcacagagattttaaatgaaccattgaaaaattctaataaatagggtatgatttatttgtcaaacttataagaaaggatgaaaattatgccaaaagtaggaattattatgggcagtgactcagatcttaaggttatgagtaaggctgcagtaatgctggaagagttaggaatcgagtatgagatgacgatcatctcagcacatcgtgaaccagatgaactgattgaatggaccagaggagcagaagaccgtggaatcaaggttatgatcgccggtgcaggaatggcagcagcccttccgggaatgtgtgcagcattatttgcccttccggttattggtgtacctctttcaggaaagaatctggatggaatggatgcagtgttctcaatcatgcagatgccgccgggggttccggttgcaaccgttgcgatcgacggagcaaagaatgcagcaattcttgcagcaaagattcttgcagcttcagatgaagaacttctgaataaattaaaagcttatacagcagagcagaaagaggcagtcaaagccaaagcagcaaagcttgattctatcggatatgaggcatatctggcatcaaaataatagatataagagtacaaaataaacaacgagtacaaaggagatcgggttatggattacaaaaaagctggtgtggatattgaagcaggttacaagtcagtagaacttatgaaagagcatgtaaagaagaccatgcgtccggaagttctgggcggactcggaggattctcaggagcattctctcttgcgaagatcaaagagatggaagagccggtactgttatccggaacagacggatgcggaacaaaggtaaaacttgccatgatcatggataagcatgataccatcggaattgatgcagtagctatgtgtgtaaatgatatcgcatgtgcaggtggagagccattattcttcttagattacattgcatgtggcaagaactatccggagaagatcgcatcgatcgtaaaaggtgtggcagaaggttgtctccagtcagaagcagcactgatcggtggtgagacggcagaacaccctggacttatgccggaagacgaatacgaccttgcaggattcgcagttggtgtgtgcgacaagaaggatatgatcacaggagaagacttaaaagctggagatgtactgatcggtatggcatctacaggtgtccacagcaacggattttctctggtacgtaaagtattcgagatgacaaaagaatccctagatacatattatgatgaccttggaacgacacttggagaggcactgcttgcgccgacaagaatctatgtcaaagcattaaagagcgtaaagaacgcaggcgtgaaagtgaaagcctgcagccatatcacaggcggcggattctatgagaacattccgagaatgttaaaagacggagtaagggctgttgtagaaaaagacagctacccgattcctccaattttcacaaagcttgcaaaagagggtaacgttgacgagtatgcaatgtacaatacttataacatgggtatcggtatgatcgttgccgttgatcctgctgatgtggataagacaatggaagcaatcaaagcgacaggtgatactccgtatgtgatcggtcatatcgaagacggagaaaaaggagtgacattatgctaaatgtcgtagttctggtatccggcggcggaacgaatctgcaggcaatcatagatgcggtagattccggcgtgatcacgaacacgaagatcgccggtgtgatcagtaataataaaaatgcatatgcactggagcgtgccgagaaacacggcattccgaatcagtgcatttctccaaaagattatgaaagccgtgagattttcaatcaggaatttatgaaggctgtagatgctctgcagccggatctgatcgtactggccggattccttgtagtgattcctgcagaaatgatcgcaaaatacagaaaccgtatgatcaatatccatccatccctgatcccggcattctgcggaaccgggttctatgggctgaaggtgcatgaaaaagcactggaacgcggcgtgaaagtggtaggagccacagtgcattttgtggatgaagggaccgatacaggcccgatcattttacagaaagcagttgaagtagaacagggagacactccggaagttctgcagagacgtgtgatggagcaggcagagtggaagatcctgccaagagccattgatctgattgcaaacggcaaagtaaaagtagaaggacatcatgtgacgatcgagtcatagaggataaaggagcagtgtaagatgaaagtattaatcgttggaagtggcggaagagaacatgcaatcgcatacagtgttgcaaaaagcgataaggtagacaagatttactgcactccgggcaatgcgggaattgcggaatttgcagaatgcgcaccgatcggagccatggaatttgacaagatcgtagcatttgcaaaagaaaaagagattgatctcgtaatcgtaggaatggatgatccactggttggcggtctggtagacgaactggaagcagcaggcatccgcaccttcggacctagaaagaatgcagccatccttgagggatcaaaagcattttccaaggatcttatgaagaaatacaacattccgactgcagcgtatgagaatttcacagatcctgccaaggcaatcgaatatctgaagacagaagccaaattcccgatcgtattaaaagcagacggtctggcacttggaaaaggtgtgctgatctgtaaggatctggaagaggcagaagaaggcgtgaagacgatcatgttggataagaaattcggtacagccggtaatgagatggttattgaagaattcatgacaggaagggaagtatctgtattatcatttgtagatggtaatacgattaagaccatgacttccgcacaggatcacaagcgcgcaggagacggagataccggtctgaatacaggcggaatgggaacattttccccaagcccgttctatacagaggaagtagacgagttctgtaagaaatatgtatatcagcctacagtagatgctatgaaagcagaaggaagacctttcaaaggtgttattttcttcggactgatgttgacagcagacggaccaaaggttctggaatacaatgccagattcggagatccagaggcacaggttgttcttcctagaatgaagaatgatatcattgatgtagtagaagcttgtatagacggtactctggatcagatcgacctgcagtttgaagacaatgcggcagtatgtgtcgttctggcaagtgacggatatccggtgaaatatgacaaaggacttccaatcagcggactggatgaatttgggaaacatgaaggctattactgcttccatgcaggaacgaagttcgacggagaccagatcgtgaccaatggcggacgtgtacttggcgtgacagcaaagggaaaagacttgaaagaagcaagagccaatgcatatacggctacggaatgggtgaaattcgataataaatatatgcgtcatgatattggaaaagcaattgacgaggcgtaaacagcaaaaatatggaaactgtgaattgcagtggaatttaatgcaaaaagaatgaaagaaagagcttacgatttaggttgtaagctctttttagttgtgttatagtatctctataacaaaagaaaatgacaggtaacaggtgataagatgttgatagaaattgattttaacagcaatgaagcaatctatgtacagttgcagaatcagatcatcatggggatcgcaacagatgcaatccgtgagggagataccctgccgtccgtcagacagctggcagatacagtaggaatcaatatgcacacagtgaacaaagcatattcgatcctgaggcaggaaggatttattcagctggacagaagaaggggagcagtggtcgccattgatgcggataaggcacaggccatgctaaaacttcgggaaaagcttgcgatattacttgcaaagggatgctgcaagaatatcagcagagaagatgtgcatgcattggtagatgagatatttgacgaatatagaagatagacagaaaggaacagacaggcatggattatacaagacaagcgaaggaagtgctgaagatcgcagaaaaaagtgcgaaagagatggcacatccttatgtgggaacagagcatctgcttctgggactcagaaaagtatacaccggtgttgcggcgcaggttctgggtgcgaacggagtagatgaggagaatatacagaaagtaatgtctgaactgatatctccgtcaggagagatgacgggcagaaagagaccggaattcagtccgagactggaatacattctggaagacagtaaagtagaagcggaacaattccattcagaagagattggaacagagcatatgctgatagcacttatccgtgatatagactgtgtagcgacaaagattttaacgacacttggagtcaatcttcagaagatatatcaggaaatatttgagactgttggcattgacccgaaggcttatcaggaagaatacggaccggaaggaggaagaaagaacggggtactggatcagtatggtacggatctgacagcagaggcggaagaaggaaagcttgatcctgttattggaagagaagaggagatcggacgtctgatgcaggtcttaagcagacggaccaagaacaatccgtgtctggtcggagagccgggtgtcggtaagacggcagtgatcgagggacttgcaacgcagattgcagaaggtatcgtgccggaaggaattcgtggaaaacgtatttatacgatggatctggcgagcatgatcgcgggatcaaaataccgtggagagtttgaagagcgtatgaagcgtctgatccaggaggtaaaggcagcaggtaatatcattttgttcctggatgaagtccatacgatcatcggtgcaggcggcgcagaaggagcaatggatgcgtctaatattctgaaaccgtcccttgcaagaggagaactgcagctgatcggtgcaacgacgatcgtagagtatcgcaaatacatcgaaaaagatgcagcactggaaagaagattccagccgatcacggtggaagagccggataaagagcagtgtcttgaaattttaaaaggcttatgctccagatatgaaaaacatcacaaagtaaagatacaggaagaagcactggaggcagcagtgaattactccagccgttatatcaatgaccgtttccttccggataaagcaattgatgtggtggatgaagcgtgctcaaaagtgagcctgcgtggatttaaagtaccggaaaatgtatacaaactggaaaagacacagacagaactggcgaaagaactggaagatgcgatcaagagtggcaatatgacagaggcctccatgcttcacaaagaactgaatgaagcagaagaaaaattagaacagattaagaaacgtttccataagagaaataatgtaaaacatctggaagtgacagaagaagacatcgcagaggtcgtatcacagtggaccaaaattccggtgagccgtctggcagagtcggaaagtgcgaagttaaataaactggaacagacactgcataagcgtgtgattggtcaggatgaagcagtaacagcggttgccaaatctatcaagcgtggaagagtcggcttgaaagatccgaagcgtccgatcggttcgttcctgttcttaggaccaaccggagtcggtaagacagaactttccaaagcacttgcggaagcactctttggagatgagaattccatgatccgtgttgatatgtcggaatatatggagaaacacagtgtggccaagatgatcggttcgcctccgggatatgtcggacacgatgacggcggccagctcagtgagcaggtgagaagacatccatattcggttgtgttatttgacgagatcgaaaaagcacatccggatgtattcaatattcttcttcaggtgttagatgacgggcatatcacagattcacagggaaggaaagtagatttctccaatacagtgatcatcatgacttcgaatgcaggagcgcagtctatcattgatccgaagaaactcggattcaatacaaaagaagatgcggcgggagattacaaacggatgaagaataacgtaatgaatgagatcaaattcatcttccgtccggaatttttgaaccgtattgatgagatccttgtgttccatccgctaacgacagaacagatgcagaagattgttggtctgatgtgcaaagaactggttaaacgcgcaaaagaacagctgggaatccatcttacaatccgtgattctgtaaagaagcatatcgtagagaccggtatggataagaagtacggggcaagaccactccgacgtgccgtacagaaccagttagaggataaactcgctgaagcaatcttaagcggagagatcggaagagacatggatgtcgttgccagaatgtctaaaaaagaaattaaatttacggcaaagactacaaattaaaaatattttattatataatagaatgaacgaaagaagaaccttaggaggacgaaaaaatggcagcagtgaaagagcttttaagagctgaaacagacggtacacttagttttggagattatacattagacagcaagactaagttagacggatttgattttcagggggacatctacaaagttaagacgttcaaagagattacaaaattagaaaagaacggcatgtttgtatacgaatccgtaccgggaactgcagtagagaatttcaaagcaacagagaacgtagtttcgtttaaagtatgtggagagacagattttcagtttacacttggaatggaagcagatgcagaatacgttgtatacatggatgatgtgaatatcggagatatgacaacgaacttaagtggaaaactcagcgtaagtgcagaagcagaggctggaaaagagattgagatcaaagtcgtaagaaaataatggcaaaagcaaagaagagtatatatttctgtcagaattgtggacatgaggagagcaagtggctcggacagtgcccgatgtgtaaagaatggaatacatttgtagaggaaaaggtgagtactccggtaagtggtgtatccagaggaagcagcgtggcgaagccaaagagccaggttgtgacattgtccagtgtatcgacgacagatgaagaacgaacaaaaactggaataaaagaattagacagagtattaggcgggggaatcgtacaaggttccctcgtattagtaggcggggatcccggaatcggaaagtccacattattgcttcaggtgtgccagaaactggcggacaagcagaagaaggtgctctacatttccggtgaggaatcactgaagcagatcaagctgcgtgcaaatcgtatgggagaatttgcagacagcctctttttattatgtgagacgaatcttgcagcaattcaaagtgtgattgagaaagagacaccggatgtggttgtgattgattcgattcagacgatgtataacgaagaggtagcgtctgcgccgggaagtgtatctcaggtgcgcgaatccacgaatgtattgatgcagctcgcaaaaggactgaatatatccacttttatcgtaggacatgtgacgaaggaaggaacggttgcgggaccgagagtgttggagcatatggtggatactgtgctttattttgagggtgacagacacgcatcataccggatcttacgtggagtaaagaaccgttttggttctacgaatgagatcggtgtgtttgagatgcggagagaaggactgtgcgaagtggagaatccttcggaattcatgctgagcggcaagccggagaatgcgtccggatctgtggtggcatgtgcgatggaaggtacaagaccaatgctgatggagattcaggcattgatctgccggagtaattttggaatgccgagaagaactgcggcgggactggattataaccgtgtcaatctgctgatggcagttctggaaaagaggatgggtctgccgttatccaattatgatgcttatgtcaatattgccggtggaatccgtatgaatgaaccggcggccgatcttgggattgtaatggccattgcttccagctataagaataaaccgatcgcagaagatacgatcgtattcggggaagtaggattgagcggggaagtaagggctgtgaccatgccggagcagagagttgcagaagcaaaaaagcttggatttaagacttgtattgtaccagcggttgcattgaagtccattggaaaagtggatggaatagaagtgatcggggtcaatagtgtgaatcaggcgatgaattatatttaagtatagttagaaccggagggaatgaagctgtgtggctttttagtgtccctgccggttctttttttattgccatgcgtacggaagaagctggcaatagcagcttttctgtgttgagaggaaattatacggtatgtgtttttcggataactgtttcatacatgaagaacataatgcataaaaagagtccaagataagccggaaagagtgtaatgcttatggatcttgcaatgataccaaaaagtgggggcatcaggcaggtgccgatataagcgaaagccatctgaactccgatgatcgcctgagacttatctgctccgaaatgtgcgggagttgagtggataatggatggataaatcggtgcacatcccaatccgatgaggataagtccggctaaagcgactgttttcccgagtggcagaagcatggcaaggacaccgagcagtataataccttcaccaagatggatcatctgcgaatcatttaatttaaacgtaatgaagccgctgatgcctctgcccacagtaattccaataaagaagagactggcaaatccggccgctttctcggaagaatatccaaggtgcagtacgaggtaactgctggcccagagagaggatgtctgctcaactgcagagtaacagaagaaagcaaagagaatttccctggctcctggaatctgaaaaatctgctttaatgtcaggacaggtaaagtattgccagagccggaagcagattgtccgacatgttctttcttatgaaattgtttccaaagaggaaggctgatgatcaaaatagcagtaagtcctatctggaaaatcgaaatataacggtatcccatagaccatccctgtttattagacaaggcgtatcccataatataaggtccgatagaagcaccgacaccccacatacagtgcagccagctcatatgtcggctttcgtaatgaagagcaacataattgttaagtgctgcatcgacacttccaccgcccaacccgtaaggaactgcccacagacacaatgcgataaaagaatgactgacagagaatccgaataaagcaacagcagtggtagctacactgatggcagtaatcttaccggtgccaagttttttggtaagtctgtcactttgcagactggatataactgtaccggctgctatgatcatggaaatgattccggcataagaaacaggtacatgaaaggccggatacatagaaggccatgcagatcccaaaagtgcgtccggaagaccaaggctgatgaatgccaggtagattacggaaagtaataagtgaaacatgtaataataactccttttattttatataagaacaatcataaaaggaaagaggatcggtgtcaagaaatggagatgggcaatttatatagaagaaaatgtgaaaaaagaagtaaattatctgaattatctaaattgcagaaaatataaaaacaatgttgacaattcgaatcctgttgtggtatattaatctagctgtcgcgttagacaagggcattcctctgctctctccgagatatacttttgcattgtggaaagttgccggctgatccgtaatgatcacaaccttttttctcgcttccatcagtgcatccagttcccggatcagaagtaacagataatttcttgtacagctgatataaactctctgatctacctgcgataacagattctttatcttattcagtatattctctgcgccttcgattgtaatatatccttctgcgtatgctttttccgatggcatatgttcctgcagccatcttgcggattcttccagcttgcggacacgattcttgcaaaactcgttgagcgggacaggcacatacttcctggtacttgcctcttccacaagatatgccgcacctttctctgtcatacttgccagagaattatatgcattagacctggatattcctgtctgttttgcaacctcataccctgttacctttccctctgtcagcaggcactgataaatgcttgcctcctgtcttgtaagtccgaattccatcaggcgctctgtaaatgatgtctgttccatcttaatcattcacctctgggctcattagtagttctctacaggaacactataagtgaattttctctgtatgtcaaggagaatctttctcaaaaacaactggaaaacaatcaaaaaaacagaaagcttcagacccgaatatttcaagcccctttgctttctgtttttctataccaaagtatgcaagagaagttgccggtgacaagttctctgtattgccatgctcatttataatcttctattttctgtcatctaccatagcgattctcatcatattgcttacggttctgttctcagatacattcgtagatggaattccaagtgttaacacaaccatatctcctgcttctgcaagctgttttgcacagatcagatcgatcgcattatcacagatatcttctgttgtgtatactgcaactgatttcagtggtctgacaccccagttgatctgcattcttctcagcgttgcttcatctgggctgataccgataatacctgtctttggtttgaacttagatacaactcttgctgtagcaccggatacagtaggtgttacgatacattttgcacgaaggttatttgctgttgttaccgtcgcatgtgcaagtgcgctggatgcgctcttaagtctgtgttctccagcttttctgaggatcatatcatagtccaggtgttcctctgtattctcaacaatgtgaaccatcatctgcagtgcttctaatggatatttaccctgtgcggtctctccggaaagcatcactgcatctgttccgtcgtataccgcattggcaacgtctgtaacctctgctcttgttggacgtgggttacgcatcattgaatccagcatctgtgtagccgtgataaccggtttgaagttatcgttacatttctggataattgttttctgaaggtatggaacttcttcggcaggaatctcaacaccaagatcacctctggctaccatgattccgtctgcacagcgaatgatctcatcgatattcttgattgcctcaaagttttcaatcttagcaataaccggaatatatggagctttacattctcttaagaatgatttgatctccaggatacattctgcatttcttacgaaagaagcagcgataaagtctacgccctgttctacaccgaatttcagatcgtcacgatctttgtctgtgatagccggaagacggattgctacgttcggtacgttaacacccttcttctctccaagttcaccgccattgacaacttcacagttgatgttattgccctttttatcttttaccttcagctcgatcagaccgtcatcgatcaggattgtgcttccggctttgacatcttctaccagacctttatatgtaatagatacgatcttattgtctcctacgatctcatctgttgtcagggtaaatgtctcgcctgcttcaagctgtactttctttccgtcttttaatacacctgtacgaatctcaggtccttttgtatccaaaaggatcgcgattggtttgttctcttcctcgcggatcttctttaacatatccatacgacctttttgctcctcatgatcaccatgagagaagttaaatcttgcgatatccattccattctggactaactttctcatcagagattcatcgttggtatttggtcccattgtacagataatctttgtttttttcatattttccctattcctctcttagttatttaacatgtgtatgtgtgaacaaatgatcctggcaatattcataattgccattacattttgagcaataccggaattccagattcggatcatccatttctgttcttccgcagactgcacatctgtgttttgctccatttgcatagacattcaccggtctttctgcctgtctcatcttgcgcttgaaatcattctttctcttcatctggcccggtgaatacggcttcatattccgtgaacttaagaaaaaaatgataaagttcaggatcgagatgaacgcagcaagtgcattcgccttataatatatgccatagtcacctccgccgtaggccggaagaaaagcctgtacgatcgcatacacaaaatacagaccatccagcatcgccagccatttgatcttgatcggtatgacaaagaacaataacagctggatatccgggtagagtgccgcaaatgcaaagaatagcgacagattcagataccatgtatccatcggtaacacagcgcctgtcagtaaatatgccagtatggctcctattacaataaagagcattcccgaaaagaaatacagattaaaacgaaaagccccccacgctgcctctaactgcttccctatcatataatagagatacagtacgaatacaataaaaatcaggctgtcagatggaggctggataataaacgtaacgattctccatatctgcccctgaagaatcttaccggcatccaggctcaggaactggctatagaacgtcggattgatcagattcagcacaaatccggctgcatataatattataatataagtcatgagatttggaatcgcatatctgctaaatttccgttcaagtttgtctaaccaattgttcatataactgctcctttatgtttattctcacactgtagatattctaccttcctgagagatatttgtcaattatgccaagtaaagttcatctctttttaacatatcttcaacatttgttaattgtcttttggccacttttgtcgtataatgttacaggtcacaattaagcaaaatgcatttaataagaagaaagacatatattttaatatgataaggagttacataatatgaatcaaaaggaattatacacacttggtatcgacatcggttctacgaccgtaaagattgccatattagatgagaataatgaagtggtattttctgattatgagaggcatttcgctaacatccaggaaactctttccgatctgttaggaagagcgatacataaattaggtcctgtccatgcatcaccggtcatcaccggttccggcggactgacacttgcgaaacaccttggagtaccattcgtacaggaagttatcgccgtatcaactgctcttcaggactatgcacctcagacagacgttgctatcgagcttggcggggaagatgccaagatcatctactttgaaggtggtaatgtagagcagcgtatgaacggcgtctgtgccggtggtacaggatccttcatcgaccagatggcttctcttttacagactgatgcctccggactgaatgaatatgcgaaaaattataaagctctctataccattgccgcacgatgtggtgtatttgccaagacagatatccagcctctgattaatgacggtgctgccaaagaagaccttgctgcttctatattccaggcagttgtcaaccagacgatcagcggactggcttgtggtaaaccgattcgcggacacgtcgcattcctcggaggaccgcttcactttctctctgagctgcgcgaagcatttatccgtacactgaagctggacgatgaacacatcatcgccccgacacattcccatctgtttgcagcagtcggatctgctctgaattccaagaaagatctggacgtggcactcatcgatatgcaacgccgtctggaaggaaaaatcaagatggaattcgaagtagaccgtatggagccgctgtttgcaacggaagcagattttaaggaatttgaggaacgtcacgcaaaacatcaggtgccagtcaaagatcttgcaacttatcagggaaaagcattcctcggtatcgatgcaggttctacaacaaccaaggcagccctggtcggcgaagacggtactttattatattctttctatcataataacgatggagatccgcttggtacaacgatttctgcaattaaagacatttacagcaaactgccggaaggcgtggaaattgtccactcctgctctaccggatatggcgaggcgctgatcaaggccgctctcttgttggacgaaggagaggtcgagaccgtctctcactactacgccgcttctttctttgagccagacgtagactgtatcctcgacatcggcggccaggatatgaaatgtatcaagatcaagaatcagactgttgacagcgtgcagttaaacgaagcgtgttcatccggatgcggttcttttattgaaacatttgcgaaatcactgaattataccgtcgaagactttgctcacgaagcattatttgccaagaatccgattgaccttggtacccgttgtactgttttcatgaattcaaaagtaaagcaggctcagaaagagggtgcggaggttgctgatatttcagctggtcttgcttattctgtaatcaagaacgcattatttaaggttatcaaggtatccgatgcatctgaactcggtaaacacatcgttgttcagggaggaaccttctacaacaacgccgtactgcgaagctttgaaaagatcgccaactgcgaagcaattcgtccggacatcgccggtatcatgggcgcattcggtgctgcactgatcgcacgtgagcgttacgttgactgcgaaggcacaaccatgctttccattgaagacattgaagccatggaatattctactaccatgaccaaatgtaagggatgtacgaataactgccgtctgacgatcaatcatttcagcggcggacgtaagttcatcacaggtaaccgttgtgagcgtggtcttggaaaacagaaaacaacaaacaagcttccgaacttattcgaatataaattaaaacgatattttgattatgaaccattggcagaggaaaatgctcctcgcggactcattggtatccctcgtgtactgaacatgtacgagaattatccgttctggttcacattctttaataaactgggattccgggttgtcctttctcctgtatccaaccgcaaggtatacgaactgggaattgattccatcccgagtgaatccgagtgttatccggcgaagctggcacacggacatgtacaatggctgatcaacaatggcattaagacgatcttctatcctagtattccatatgaaaggaatgaatttgccgaagccaacaaccattacaactgcccgatcgtaacttcctacccggaaaatatcaagaacaacattgatgcgatcgtacacggagaggttgatttccttcatccgttcatctcatttgccagtgaagagacgatttcttaccgactggttgaagaattatccgagaagttccacatcccggcagatgagatcaaaaaagcaactcatactgcatgggaagaactcgctgcatgcagaaaagatatgcagaaaaaaggtgaagagacgatcaaattcttaaatgaaaccggcaaccgtggtatcgttctcgcaggacgtccgtaccacatcgacccggaagtaaaccatggtatcccggaactgatcaactcttataatattgcagttctgacggaagattcgatctcccacttaaatcctgcagagcatccattaaatgttatggatcagtggatgtatcattcccgtctgtatgctgctgcaaactatgtaaagactgtagataatctggatctgatccagttaaactctttcggatgtggtctggatgctgttacaaccgatcaggttgcatccatcctgaacgattctgacaagatctacacctctcttaagatcgacgaggttaacaacttaggtgccgcaagaatccgtgtaagatcactgcttgctgcgatccgagtccgagaaaagcgcggggataaacgtgagatcaaatcctccgcaatcaaaaaggttgcatttaccaaagagatgcgtaagaattacacgattctctgcccgcagatgtctccgatccatttcgagcttctggagcctgcatttaattcatccggatataaccttcaggttctgccgaacgacaacaaacaggccgttgacgtaggactgaaatatgtaaataacgatgcctgctatccgtcactgatggtagtcggccagatcatggaagctatcctttccggtaaatatgacacacacaagattgccgtgatcatcagtcagaccggtggtggatgccgtgcttccaactacatcggattcatccgccgtgcccttaagaaggccggttacggatacattccggtcatctccatcaacttaagtggtctggaggataatccaggattcaaactgactccgaacctgatcttacgaggtatctatggtgcagtattcggtgacatcttcatgaagtgtgtataccgtctgcgtccatatgaggctgttccaggctctgtcaatgcaatgcacagaaaatgggtaaaggtatgccaggactttgtatcaaacggctacccgagcagacgtaaattcaaacgtctctgccgtgagatcattgaagactttgacaataacatcgaattacttgatataaagaaacctcgtgttggtgtcgttggagaaatccttgtcaaattccttccggcagccaacaactacctggtagatcttctggaaagcgaaggagccgaggcagttgttccggatcttctggacttcctgctctactgcttctacaaccagaacttcaaggtagaaaagcttggattcgaaaagaaaaaagccacaacagctaatcttggtatcaaagctctggaatggttccgtgctccggcaactgaagcatttgcggccagcaagcacttcacaccacctgctaagatccatgatcttggaaagatggcttcggacatcgtatctcttggtaaccagactggtgagggatggttccttacaggagaaatgttagagctgatccacagtggtgcaccaaatatcgtgtgtacacagccattcgcctgcctgccgaaccatgtcgtaggtaagggagttatcaaagaacttcgcagacgctatccggaatctaatatcgtagcgatcgatttcgatccgggtgcaagtgaagttaaccaattgaatcgactgaagttgatgctttctacggcgaataagaatttgaataaataattggagatttaatacatcagacgacggttacccggaccggaataaaagttaggaatcctctacattcactggaaaggattcctaacttttattccgtgggtatcgaatgcctgaagaattaaatggcggaaggttacgaaaaaaccgaaaaaatgtagcaaaaaagaggatgaatatctgtcactcaactaaatgagatttgatatttatcctcttttttcatccaacagttgtcaaatgtatgctatcaagcaatagtcaaatagttctatttttcatactactttcaagcataccacaaagcttgattttaatccattccttagaatttaccagcctgagctgcttcctcaacggatacagcaactgcaacagtcataccaaccatcgggttgtttcctgctccgatcagtcccatcatttctacgtgagctggtactgatgaagatcctgcgaactgtgcatctgagtgcatacgtccaagagtatctgtcataccgtaagaagctggacctgcagccatgttatctgggtgaagtgtacgtcctgtaccaccgcctgatgctactgagaagtacttcttgccctgctcgatacattctttcttatatgtacctgcaactggatgctggaaacgtgtcgggtttgtagagttacctgtgatagatacgtctacgccttctttgtgcatgatcgcaacaccttcacgtacgtcgttagcaccgtagcagttaactttagaacggagtccgtcagagtaagagattctctgtacttctttcagttctcctgtgtagtaatcatattctgtctgaacatatgtgaatccgttaattcttgagatgatctttgcagcatcttttccaagaccgttcaggataacacgaagaggtttcttacgaactttgttagccttctctgcgataccgatagcaccctcagcagctgcgaatgattcatgaccagccaggaatgcgaaacactctgtatcttcttccagaagcatctttcctaagttaccatgtccaagacctacttttctctgatcagcaactgatccaggaatacagaaagcctgaagtccttctccgattgctgctgcagcttctgctgctgtcttacatccttttttgattgcgattgctgcacctacgatgtatgcccagcatgcattttcaaaacagattggctgaatacctttgatctgattgtatacatcaagtccggcatcctttgtgatctgctgtgcttcttcgatagaagaaataccataaccagccaatacttcattgattttatcaattcttctttcatatgattcaaataaagccattaatttatcctcctgattaaattaccttaaaatattgagattactccttacgtgggtcgatgatcttaactgcatctgcaacacgtccgtactgtccttttgctttctcccaagcttcgtttggagtgtctccagcttttacgaagtctgtgaattttccaaggcttacgaactgatatccgatgatctcatcgttctcatcaagagcgatacctgttacatatccttctgccatttcaaggtaacgaggacctttagctaatgttccgtacattgtaccaacctgtgaacgaagtccttttccgaggtcttccagtccggctccgatagcaagtccgtcttcagagaatgcactctgagttcttccgtatacaatctgcaggaataactcacgcattgctgtattgatagcgtcacaaacaaggtctgtgtttaatgcctctaaaatagtttttcctggaagaatctcagaagccatagctgctgaatgtgtcattcctgaacatccgatagtctcaacgagagcctcctggatgataccgtctttaacattcagtgttaatttacaggcaccctgctgaggagcacaccagcctacaccatgtgtaaaaccagagatatctttaatttccttagcctgaacccattttgcttcttccggaatcggagctggtccgtggtttgcaccctgagctaccggacacatcatttctacttcctgtgaataaatcattttaaaactcctttcaactatgtaagtttgcttatcgtaaggtttgttatc

SEQ ID NO: 13 - DNA, 2919938 bp, Dorea longicatena (residues 1,459,970-2,919,938 of 2,919,938)
  misc_feature (995192)..(995334): n is a, c, g, or t
  misc_feature (1511631)..(1511729): n is a, c, g, or t
  misc_feature (1660257)..(1660410): n is a, c, g, or t
  misc_feature (1757803)..(1757993): n is a, c, g, or t
  misc_feature (1980431)..(1980611): n is a, c, g, or t
  misc_feature (2003607)..(2003726): n is a, c, g, or t
  misc_feature (2065760)..(2065769): n is a, c, g, or t
  misc_feature (2133831)..(2133981): n is a, c, g, or t
  misc_feature (2181048)..(2181191): n is a, c, g, or t
  misc_feature (2243088)..(2243097): n is a, c, g, or t
  misc_feature (2276969)..(2277052): n is a, c, g, or t
  misc_feature (2295954)..(2295963): n is a, c, g, or t
  misc_feature (2296303)..(2296312): n is a, c, g, or t
  misc_feature (2312734)..(2312833): n is a, c, g, or t
  misc_feature (2319263)..(2319503): n is a, c, g, or t
  misc_feature (2326820)..(2326941): n is a, c, g, or t
  misc_feature (2354535)..(2354685): n is a, c, g, or t
  misc_feature (2360950)..(2360959): n is a, c, g, or t
  misc_feature (2371858)..(2371994): n is a, c, g, or t
  misc_feature (2413602)..(2413751): n is a, c, g, or t
  misc_feature (2459335)..(2459502): n is a, c, g, or t
  misc_feature (2513596)..(2513605): n is a, c, g, or t
  misc_feature (2516409)..(2516418): n is a, c, g, or t
  misc_feature (2639039)..(2639105): n is a, c, g, or t
  misc_feature (2641913)..(2642006): n is a, c, g, or t
  misc_feature (2770632)..(2770641): n is a, c, g, or t
  misc_feature (2837028)..(2837113): n is a, c, g, or t
  misc_feature (2840997)..(2841155): n is a, c, g, or t
  misc_feature (2896530)..(2896636): n is a, c, g, or t
  misc_feature (2914620)..(2914629): n is a, c, g, or t
  misc_feature (2914995)..(2915004): n is a, c, g, or t
  misc_feature (2915782)..(2915942): n is a, c, g, or t
tctttaacatccatacttgtatttattttctcatatatttcgacattcgtcaattgatttttctctacatttttgtatggaattttctctttttttggcacaatttgcaaaaggttcttctctgggaaataccattcccgaagaagaaccttctcatatctctttcgacctgttttctttcaaaagaatccttatctgccttttttacaaatttcttctgaacctacataccgccctgtgtcagtacctgtacattctttgcaatataatcgatcaaagatacgattgtaagtaccagagatacccagatcagtacctgtgcgatcatgttaaatgcaccgccaagatctgcgatcagaaggatcagcatgaacatctgggataccgttttgaattttccccagtagcttgcagcgatcacaatatcgttgtctgctgctaccagacggaatccgctgatgataaattctcttgcaataattacgattacaaaccatgcctgcagttttccaagcgggatcatgcagatcatagccgaacatacaagcagtttatctgccagcggatccataaactttccgaaattggttacaagatttctggctctggcgatctttccgtccagcatatctgtaagacttgccacacagaaaataatcaatgcgatccatttgtttgcagctccgcccacgcctgtcagcatgaaaaatacaaaaaacggaaccatgattactcttaaaacagttaacttatttggtaaattcattacatcaactctcctatcaaatcatattctgctgctccggtaactttcacttttgcgaaatcaccagtcatcagttcttcatcggtatttacaaaaatcagtccgtctacattcggtgcatcgcggtaagttcttccgacatatgcattctcatcggcaacttttccttcgatcataaccagtacttcttttccgatcatatcttctgcctgatcgaatacaatctcctgctgcagctccataatatctgcctgacgatcttcttttacttcttcgtcgatctgatccggcatggtcgccgccggagtatcttcttccggcgaataagtaaatacgcccagtctttcaaattccatctcatctacgaattccattacttcttcatgctgctcctgtgtctcccctgggaaaccggtgatcaacgttgtacgaagtgcgatgtccggaatctcttttctcagttttgtgatcgtatcgatcagctgctgcttggaagttcttcttcccattctctttaagatcgcatcgcttgcatgctggattgggagatccagataatggcatatcttcggttcttctttcattacctgtatcagattgtcatcaatctcttccggataacagtacagaaggcggatccagcggattcctttgatctgacataactctttcagaagcttatgcagggatttttcaccgtaaatatcctgtccatataccgttgtctcctgtgcaaccaggatcagttcttttacgccctggtcagccagttcctgtgcttctttgatcagacgctccatcggtacactgcggtaatttccacggactttcgggataatacagtatgtacagtgtttgtcacagccttctgcaatcttcagatatgcatagtgacctccggtcgtcacaagtctctttgtctccggaagcggcagcgcatcgatatcggcaagttctacttctgatttaccttccagtgcttcttctactgcttctacaatcttatcatacgaagtcgttccaagcactacatcaacttccgggatctcatcaataatctcctgcttatatctctgtgccagacatccggttacaaccaatgcctttaatcttccttcttctttatatcttgccatatccagaatcgtctggatactttcttcttttgcgtcatgaataaaacaacaggtattaatcaccataacatctgcctgtgtctcatcatcaacaatctggtatcctttcgcatccagaagtccaagcatgacctctgaatctaccaggttcttatcacagccaagtgatacgaaaaatatattcattcggttctcctttttatttatttctgatttttgcagtatgcattctattcggcacacatctttgctatcttgctatatccagttcaagaaaggcagacaccttgcggcatctgccttttgtatctcagtcagcaatgtgtctgaaagaatccgtctgcaacggatccttaaggtgtcagattttattcttcttcctcttcatcctgtgcaatgatcgtcatctttccctgattcatctcatcaattgcaatagaaagtggcttttcgccaacctttgcatcaacgagcggcatagatccgtcaataatctctcttgctctctttgctgtagccataacgatggaataacggctgttaactacctttgtttcgccctcttcaacgtctttatttactactttcattaagtctgtgtaagatggatgtaacatacacttattctcctttcaattcttctttcatatgctctataaattcagcgttacggaaacttcttctgtgctcaccctggatgatctgatgcatctcttctacgcattcctgcaagtcatcatttatgatcagataatcatattgatccatctccagtgcttcttctttcgcacggttcatgcggaattcgatcacgtccattgtctctgttccacggcccaccagacggctcttaagttcctctgcgctcggcggtgttacaaacaaaagcagtgtatccgggaatttttcttttactttcaacgctccctgaatttctatctcaagaatcacatcttttcctgcctctaactgctcctctacatatgcacgcggcgttccatagtaattatccacgtacctagcatactctatcagttcttctttcgcaatcattttttcaaaatcttctacagttttgaagaaatattcccgtccgtcttcttcccccggacgcggatttctggtggtggcggaaatagataatgcataattatcatactgttttaacagctctttcataatggttcccttaccggaacctgaaaaacctgatacaacgatcagaatccctttttctctcatttcgataccctcttttaatcttcttaacaatctgatttattcaatattctgtatctgctctctgactttctcaatctctgtcttaagttcgattccgatattggaagtctccagatcattcgccttcgaaagaatcgtattcgcttcacggttcatctcctgtgcaatgaaatcaagcttacgtccgattccactgtcatcagactgaagggttgccttcatatgttccacatgacttctcagacgtaccacttcttcatcggtacagatcttgtccgcaaagatcacgatctctgatgcgatccgtccctcatcgatctgtgtgtcctccagaagttcttttacttttccttctagcttttctctgtactccgcaatgatcttcggtgcacgttcttcaatctgtccgaccagttcaagcataccgtccagcttcgcgatcagatccttcttcagattctctccctctacggttctagtctgtacgaactgtgcgatcgcaccatccagtgcttttttaagtcctttccacagttcttcttcatcatccatcttctcttccattgtgaggacttccggataacgggacaatgtggatacacggatgtcattctccagtgagaatttttcttccatcattttaaacttttccagatattctgctgccagtgtctcattgtattttaaagagacctgactctctgaaaagtcttcatatgtaataaagatgtccacctttccacgatgaacactttcctttaaaaggcttcgaatggcactttcaaaaaaattaagcttcttcggcatacggatattggcatccagataacgatgattcactcccttcatctcaaccgtgaatttacgttcctcatcagccgcttcgcagcgtccgaatcctgtcatactcttaatcatgatatgatcctcttcttattcattatttaaaataaaccagcatttattataagacatttggcaaagttcgtcaactatgctatactagacaaatatgaaattctgtaaggaaaggaaggtctttttatggcttttgacggaatcacagtcgcagcagtcgttcaagaattagaacatactctggtcggcggacgtatctccaagatcgcccagccagaaaatgacgaactgcttttaacaataaaaggaaatgaaggacaaaaaaggctctatatctctgccagtgcttctcttccacttatctatttaaccaacgagaacaaaccaagtccgatgacggctcctggattctgcatgcttctgcgcaagcatatcggaggcggacggatcaccgcagtctcccagccgtcactcgagcgtatcatccacctggatattgagcatctggatgagatgggtgacttgtgcagaaaaaaactgatcatcgagatcatgggaaaacacagcaacattattttctgtgatctgaacggacgcatcatcgacagtatcaagcacgtctctgcacagatgagttcggtacgtgaagtattgccgggacgcgattactttattccggatacgatgtcgaaaaagaatccgataacggctacgcaggaagaattcatttcggcaatccttgcaaaaccgatgccggtatccaaagcaatctattccagcatgacaggtatcagcccggtcattgccgaagagatctgttatcttgcaggtgtggactcttccatgacggcgcatgatctttccgaagatgtactgacacatctgtaccgtcagtttacctattatatggaggacgtaagacagggaaatttccatccttctatttattataatggaaatgcgccaaaggaattcagtgcccttccggtcacacattttaacgaatatacaaaaaaagagttcttttccatctcggaagtcctctatacgtattattccacacgtaacacactgaccagaatccatcagaaaagtgcagatctccggcacgttgtccagacagcactggaacggaaccgcaaaaaatacgatcttcagtccaagcagttaaagggaacggaaaagcgtgacaaatataaagtttacggagaactgatcaatacttacggctataatctggaaccgggatcaaaagaactgactgccctgaattattataccaacgaagagattactatcccgcttgatccgacacagactccgggcgagaatgcgcaacgttattttgcaaaatacaacaaacagaagcgtacatttgaagcattgacggagctgatccaggaaactgccgatgatatccagtatctggaatctatcagcaacgcacttgacattgctctgagcgaagcggatcttgcccagatcaaagaggaactgatgcagagcggctatatccgcagaaaacatacaaagaaaaaagttaaactgaccagcaaaccaatgcattacatttccagtgatggttatgatatgtacgttggaaagaacaacctgcaaaatgaagaacttactttttcttttgccaatggcaatgactggtggttccatgcaaagggtgctccgggatctcacgttatcgtcaaaagcggcggggatgaacttccggaccgtacctttgaagaagcaggtcgtctggccgcttactattctaagaatcgtggtgctgacaaagtagagatcgactacattcagaaaaaacacgttaagaaaccaaacggtgcaaaaccgggattcgtcgtttactatacaaactattcactcgtcatcgattctgatatatcgaatataaaaaatgtgcaggattaactcctgcacatttttgccttcttattcatatattgcaaatagacatatcctgtcacgtctgccagaaaccatccaatcggaattgaccaccagattgcaatcactccaatcgactttatcggtgccagtgtataagaaagcagcactctcgttccaagcgagatcaccgtcagcaccaccgacatctccggtcttccgaccgctctgtaatacccataccacaagaacagaataccgattccacagtaaaatgctccttcgatatgcagatactgtatcccgacgcggatgatctcatgctcactgccgtcgataaatgccagcatcagatatctggctccaaagtagatcagcaccgacacacagatacagaatgccgctgataccgttactgcactacggacacctttctgtactcttttttcctttccggctccccggttctgggaaatgaagatcgaaaatgcatttgcaaattcctgcgccggcatataagcaaatgaatcaatcttcacagccgctgcgaatgccgccatgactgcggttccaaagctgttgaccagaccctgtatcatcaggattccaaaattcatcactgactgctggatacttgacgcagccgaatagcgcactacttctcccattacactttggctttcctttattctttccggccgcagggaaaaacgtaattccggcatttttatccatgtataaatacagattccaatcccggatacaatctgggatatgactgtcgcgatcgccgcgcctttgattcccatacggattccatacaccagtgcaagatccagcacaatattcagtcccgaagaaattcccaggaataccagtgacaccaccgaatctcccgccgctcttagcagaaacaaaaagtaattataaagaaaaacaaaaaagatgccccagaatatataccatacatattcctgcatcattccataaatgtcctccggtatctgaagaatattcaggatcggtttcatacacacaaacacaacaatgttcatcacgatcgtcacgattccaataatggaaaatgatgccgtcatttcatattgcagccgcgccgtatcccgttttccgattgaataagaaaataatgatccgcttcccatacacattccgatcagcaccgaagtcagaaatgtcatcagactgtatgccgagcctactgccgccagagcccccgccccaagcgcccttccgacaatcagcatgtccacaatattataacactgctgcagcaggtttcccaagatcataggacctgcaaacagcagcattgtctttgtcacatttccggttgtaagatcttttttcaaatcttatctggttcctgccaggtaatcgataaactgctgggcggttcttccggataatcctccgtggcttaattcccacttgtttgcttccagcaataattcatcatccagcatatcaattccgttcttctttgccagttcacgtacgatctcctggaactgcttcttatccggttttccaaagtagatcgtaacaccgaatcttgccaccagggacagcttctcctgaacagtatcatttgtatgaagttcttcatctctgtcttctttatctttgaatgtctcacggatcaggtgtcttctgttcgaagttgcatagattagtacgttatccggcttcttctcgagtccgccttcgatcactgccttcagatatttatattcgatctcaaactcttcaaaagaaagatcgtccatgtaaatgatgaatttgtaattacggttcttgatctgtgcgatcacatcattcagatccttaaactggtgcttgtatacttcgatcatacgaagtccctgatcgtaatactgattcaggattgctttgatggaagacgattttcctgttccggcatcaccgaataacagacagttattggctttcttgccttctacaaatgcttttgtattatcgatcagctttttcttggcaatctcatatccgaccagatcatccaaatgtacgtgtgcgatcttcgtgatcggctcgatcaatgccccttcttctgtatgtgcgatacggaacgctttgtgaagtcctagctttcctacaccgaattccttgtagaactgtgtcatgatatccttgaattctaccgcggtctcagtttctgcaagtgctttgctcagatcacagatacggtcgcggattctctgattgaacacacttccgtgtccgctggttccgacataatcatgtaacatagagatacagtccacacccatcacattctccagatctgcaaagtcataatcaaataattctttgaagatttcaaaatcatgcagtgcaacctggttgatacttccgtctaccggtcctacgatctcacaggaggtactgtaagcattctcatgacttgccatcaggtaagtcagataattatgccagagatctccctcgaatccgtggcttacagccatctccagaatctcgttgaccgcatcatataacagtcccttcatatcttccatgttatagtaatcattctgataattctccattaagaatgtcatatcctgaaggatctgtccttcctccatatgtttatataacatcaactcatttgttctcatttgtcattcctccaattttatatccgacctgctatgcctagtaatttccaagaattcttaaatttcttccctcttcacgaagtcccctgattgcatttttcaccgcgggatccgcaagatttccctcgaaatcaataaagaagcggtattcccagctttttccttccatcggccgggattcaatttttgtcatattcagatcattatacgcaaaatgtgaaagcagatgataaagagaactgctttcatgagggagctccagacaaatgcttatcttcttcgcatcttttaagaatactttctggtttgtgataacgatgaatctggtcgaattattcttttcatcattgatactatctgcaagcacagaaagtccgtatacggatgccgcataagcactgcatacagccgcctgatgtttatcctgatcttcaagtatcttctttgcagcaagtgcggtattcgctacactgatctgctgccagtctccgtgttctcccagaaaatgcgatgcctgcataagtgcttccgccttggaatatacacgttcaatctcagatatatctgttcccggtaatcctgacaatgtatttttgatcgggatgatcgtctctccgacaatataattttcaaattctaccagaaggtcatagatttcattcactgctcccgctgttgaattttcaatcggaagtactgcataatctgccgcgccttcttcaattgcctccattgcctcccggaatgtatgtacatgatagctgttacatccttttccaaaataatgttccattgccgcctgactgtaagccccttctgttccctgaaatactacccttgctgtatccttatccagtgaatcaatgccgataaacggaagtcttccaagtgcacctgcttctacaagctgcttgtactgtaattttctactgatcgcaagaagcagttcatatacttctccgattccttttttattaaagtctgatgaaacttttcccatcacttctgctattttattcttttcacgctgacggtcaaatgttttataaccatttttaatcttacaggtcccgagatcctcacaaatcttcattcgcttttcataaagatccgtaatctgatcatcaacatcacttaactgcgttctaagttcttccaatgatgtcatttactctctcctttttgtatattatgcaggaaatctgcgtatttattaaattataatacattccaaaaataaaatctacccatcctgatttaaaaaaatcatcgaaaaatttttcaagacattgaaaatcatcgttaaatattatatgatgtatgagagatttgaaaacggaggtaaaaccatgaatactttagaatgtatcaaaacaagaagaagcattcgcaaattcaagcctgatcctgtagatcacgcaactttagaatccctgatcggtgcagcatcttattctccttcctggaagaacactcagatcactcgatatatcgcaatcgaagattcttctattcttgataaaatcgttactgattacaccccagatttcaacgcaaaaattataaagcaggcaccaatgcttattgcagttactttcaaaaaagggcgctgcggttttgaacgcgacggttcctacagcaccaaaaaagaagaccgctggcagatgttcgatgtcggtgttgcaagtcagacactttgccttgccgctcacgaagctggtcttggaactgtaatcatgggcatctgggatgaagacggcatcaccgatcttttacatattccggaagatcaggagcttgctgctctcatcgccatcggatatcctgatattgatcctgatgcacctaagagaaaatctgtcgatgatttattaacttatttataaaacaggaggttttgacatgagacacttattaagtccactggatttttctgtggaagaacttgacaatttaatggatcttgcaaaagatatcgaggcaaatccgaaaaaatatgcacacgcatgtgaaggcaaaaagcttgccactcttttctatgaaccgagcacacgtaccagattaagccatgaagcagctatgatcaatctgggtggcagcgttcttggtttctcatccgcagattcaagttctgcttccaaaggggaaagtgtagcagatacgattcgtgtaatttcctgctttgcagatatctgtgcaatgcgccatccaaaagagggtgccgctatggttgcaagccagcatgccacaattccggtgatcaatgccggtgacggtggacaccagcatccgacccagacacttacagatctgcttacaatccgttctttaaaaggtcgactcgataatatgacaatcggattatgcggcgatctgaaattcggccgtaccgtacactctctgatccatgcactggtacgttatccggggatccgttttgttctgatctcaccggaagaattaaagcttccaagctatatcaagaacgatgtattagaccgtcagaatattccttacgaagaggtagtacgactggaagatgcccttcctgatctggacattctttacatgacccgtgttcagaaagaacgtttcttcaacgaagaagattatgtacgtatgaaagacttctacatcctggacaacaagaaaatggagcttgcgaaagatgatatgtatattctccatccactcccaagggtaaatgaaatcgccacagaagtagacaatgacccaagagctgcttatttcaaacaggtacaatatggtgtttacatccgtatggcactgatacttacacttttgggaattgaagtttaggaggaagataacaatggtaaaaaatacattaactgtcggacgtattgaagaaggatttgttctggatcatatccaggcagggcgaagcatggatatctataaatacctgcatctggataaactggactgctgcgttgcaatcataaaaaatgcaaagagtaataaaatgggaaagaaagatatcatgaaaattgagtgtccgatcgactttatggatctggacatcctcggttttattgatcataatattaccgtaaatattataaaaaattctgagatcgtagacaaaaaagctctccatctgcctcacgaaatccgcaacgtgattcactgcaagaatcctcgctgcatcacttcgatcgagcagggactggatcatgtcttcgtacttacagatcctgaaaaagaagtttaccgctgtaaatactgcgaagaaaaatatgacggaagacgcaaataaagcaaaaaataccgcctgataattaatatcagacggtatttttatattcattcaaattgcaagcaaaacgataagccgggttatgtcgttgggtaatcatctttctagacccatcgttaccaatgggttcaagcaacctacctaagacgtgacgggccgccacattgtctttatccggtcttgcttcgaatggggtttacatatgcccctgctgttaccagcaaggcggtagtctcttacactgcccttccacccttaccagaattatattctggcggtatatttctgttgcactatccttggagtcgcctccaccggacgttatccggcatcctgccctgtgaagcccggactttcctcacctgctgcctttcggcatctgcagctgcgattacctgtcttacttgcacttttcaaaagcgtttattattatagcactatttattcaaaataacaaaccttttttccgatttcataatcagacaattcctttcagacttatggcaattcgaatacctgtcctggtacctttacatgcattacatgttctttataggattctgcctgcggattattcataagtttctcataaacttcatagtgtccccacatatgcatcggaaagaccagttttgtatctgtatgcttcatgaaataatccagtccccagtaatattgctcttcctgtcttggatctaacggaacaaatgctacatcaatccgcatattttttaatttatggatttctttctgataatccatccgcatctgttcgttataatattcactttcttcttcccaatgccaccagttcagatctcctgcgtgataaataatcctatcatctacatacacaagaaatgctacacccgcatccgtagaatgaagtgtctgtactttcagattaccaatccgatattctttgtcggcaataacaaaccatacctttgaagggaccggcttttctgtaatatctgccgacagtatatatcttacgttcggatatatgttctccagctcaaatattttccggtcaaaatgatcataatgtgaatgactggaaaatacataaatttctttttccgaatcaaattcaggaagtttacctttataccagtcgaagatcaatacatattttttgtattctacagcaaaaccgctgtgatccaggtacgtgatcttcattctttatgcctctcccttgataacctttacagcatgcacaagttccggaagtaagaatctgagactttcttttactgcctgtgcttttcccggaaggtttacgatcagtgtatctccactgattccggccgcacttctgttcagcatactgcgtcttgtcagtttcatagtatgcgctctcattgcttcaggaatccccggtaccggtctgtctacaatattcattgttgcttctggtgtacagtcacctggattacatcccgcaccgcctgttgtaaggatcagatctgctgtttttccatctgtcatgcgcttcataacagttgacaatacttctctgtccagtggaagtgcccgcataaagacaacttcaagtccagcttcttctgccacaagcttcactgcttccccgctttcattcgctttcgttcctttgtatatatctgtatttgccgtaataattgctactctcatatcgtacctccaacgttcatttgtgatagtcatatacttttatattttaacccttttatgaaaataatgcaatcttacacatacagaatcaataaaatatcatactataaagctttgcggtacaacatctccacatcctttaatgttgtctgtcttggattagccgcaatatttccactcttcatcgcatctgcagccatctgtggaatcttatcttcggttacaccgacctcggaaagtgtttttggaattcccagagatgcattcagtttcttgatttcttctaccagcatttccggtttaaaatctttcaccggctctttttcttcgctgatataattgtaaatcttttcgtaacgtccatgatctgccagcgcattatattctacaattaccggaagaaggattgaattggccactccatgctgtacaccaaagaatgcgctgaccggatgtgacatggcatgtacatctccaagtcttgcccaagcaaatgcaattcccgcaaacatacttcctgacatcattgcacatgcagcttcctcgtcctttctgtttgccacaaatctacggatattaccgccgatcagttccattgctttttctgccattgcatcagaaaacggtgaagcgccaagtgatgtatatgcttcccatgcatggatcagtgcatcaattccacatgaagccgcaaccatcggtggtacagacatgatcatctccggatctaacagtgcgtattttggaagtaattcatagctaaaaaccgttaatttataatttctggaggtatctgtaataacggagaacgccgtaacttcacttccggtacctgctgtagtagggattgctatgattggttcgatcggtcccggaacaagatgtgcaccttcatactctgtaatggatccgccgtatcttgccagaacacctactgccttggcaacatccatcgggcttcctcctccaagtgcaactatacttgtcgctcctgattccttatatacctttgtcgccgcatttaccatatctactgtagggtttggaagaatatcaaggaaacttactgtttctataccttctgcctccacaatatccagcactttctgtatgactcctaatttctccagtcctctgtctgatactaccatcatctttttagatccgcttttttcaagaagctccggcagtctttttaaagagcctacaccaaatacaatatcctgcggtactttgaacgtgtaatctttcatttttatcatcctccagattcttattgtctattatggtaaaaaaaagagaccacaccctgacgagtatggcccctttaccaattcctaattcatattatagacacattctattctatatttcaagtgttttttgaattttaagtcataattctaaataatgatacacaccatgcctccattactgtcattcacaaccttttgcatagtatcctgaagtttttcctggctttcgtcattaataactgccattttattcttcatcccgtccatgacaagttcttctactgtctttccgaatatactggttttccagatacctccttccattttttcctcatttttaatatactggatcaaatctttcgcctgctgctcatttccaacaatcggggctatctccgtctctatattagcacggatcaaatgaatggacggcgcctgcgaatgaattttcaccccatatttatttccctgtctgataatctctggttcatccagtacgatctcttcttttgtcggactgactactccataccctttcatccggactgcagtaaatgcatcttctacattttcatattcattctttaagattgaaagtttctgcatcgtctttatcagatcatactggcctgtgatcgtagttcctgtcatctcacttaacatttcataataatatttttcatacatgtggatctgaatgataacacagcctgtatccatctgtatctgttctacataccagtcttttatgtatggactttccggtcttccggttaaagctgccgcatctttgatctcttccaggtgttcgaggattttttgtatatgttccagaaggtcctgtttgatcttgtgtgtaaccggaagcatttccacccatttcggtatataaaactgtacctcagatatcgggaattcatacaaaacggcctccagaatccgataaatatcttcttcctttatttgttcacaatttacggtcattgctttaactccatatgtatcttccagtttttttgccttctccttagcctcctggccatgtggtttttttgaattcaccagtactacaaatggttttcggatagactgaagttctcttatagtccgtgcctccgcatcttcataattttccggcagaatatctgtaatcgttccatcggttgttaccacgattcctatcgttgcatgttcatgaatcactttttgtgtaccgatcaccgctgccttggtaaatggtatttcttcctgataccacggagtctttaccatacgttcatgcccggcctcctcgtgtcccgaagcaccctttaccatatatccgacacagtcaatcagacggatccttacttcaacatcctggttcagacgtatcactgcagcatctttcggtacaaatttgggctctgttgtcataatcgtcttgcctgccgcagactgaggaagttcgtctcttgtccgctctttcttatgttcatcttccattcttggcaacaccattacatccataaagcgtttgataaatgtcgattttcctgttcttaccggtccgacaacgccgatatagatttctccgtttgttctcgcttttatatctttatataactgttctgtgtccactttccctgctccttcccgttgtgctgttaaagtatatgcacttcttcgctctttatagaactttcactacagatcaatagtcattttctatcatttccgtatctgtttagcatttgtttatgcatctgtaatttgttaaaatataagcaaagataaagttttattacaaaaaggagattcttattatggaaagacatcagattaccggacacaccgaattaatcggtcttctggcttatccaatccgccactcgcagtcacctgcaacacataatgcagcttacgaaaagctaggtgttgacattgtaaatcttgcatttgaagtagatgcacctgaacttgaagatgcaatcaagggcttacgcgcactgaagatgcgtggtgccaatgtttctatgccaaataagacaatcgtacatcagtatctggatgaaatctctccggctgccaaactctgtggtgcggtaaataccatcgtcaataaagacggctacctggtcggacacatcacagacggtatcggttatgtacagtctttaaaggacaatgacattgaccctaccggaaagaaagtaacaattgtaggttccggcggagctgctactgctgttgagatccaggctgcactggatggtgttgctgagatgtctatcttcgcaagagatgacaagttcaaacagaatgcactcgatacggtaaagaaaattaacgaaaataccaattgtaaagcaacattctaccctctagaagatctggataaattaaaagaagagatgcattcttcttatcttttcacaaatgccacaggcgttggaatgaagccactcgaaggaatcacttatattcctgatccttctttcttccgtcctgatcttatcgtcacagacgttgtctacgccccacacgaaacagcaatgttgaaaatggcaagacacgccggatgtaaaacaatgaacggacagggcatgatgctcttccaggcaattgcagctatcgaactgatcctcggcaagcgtgtggacagtgaatacatgaaagaaaaactgggaatttcctacgtttatgaagattaaggagaatttttctatgaacactgtaaaagtaagaaatctggaactcggaaatggaattccggcaatctgcattcctaatgtcggaaaggcaaaagaagacatcctttcccttacccgtacatatcttgacatgcatatggatctgatggaatggcggatggactggtacgaagatgttgaagatattgcaaaagtcacagaactcgtcaaagaacttcgtgatgtaatgggcgatactcctcttctctgtaccttccgtacagacaaagaaggcggcgtacatccaatgtccacagaaaaatatgccgaacttaacaaagcagttgcagcaaccggcaatgctgatattattgacgtagagatctttacaggagatgacactgtacgggagatgattgatgcaatccacgcttccggtgcaaaggtcattgcctctaatcatgattttgacaaaacacctgccaaatctgatctcatttaccgtctccgcaaaatgcaggatatgggggccgatattcctaaaatggctgttatgccacagaccaaaaaagatgttctgacccttctttctgctactgaagagatggcatcagactatgccgacagaccgatcatcaccatgtctatggctggacttggaagtatcagccgtattgcctgcgaggcatttggttcctgtctgacatttggttccggagcacaggcttctgcacctggacagatcggagcagaaaaattacatcaggcacttcagattgtgcacgatgcattgtaaaaaacgaaaaaagagagagggcccatggatattcccacaggccctcattttatgtttattacatttattttaatatattatcctgccacacaacataacacaggcacatattttttatccctgttttttctgtgtaagaagcctctgcgcttcttcatctcttttggcatctacctgatccagttcctctgttgtaagcactcccagttttttcttctggaaatccatattagaaagtaacaggttcattgcaaagccgacgagcaatgcccatccggatcctttgaacgccaataccgctgccataacacctgcaatactcttatctgtgttagactgacagtattccataccaattctggcacagacataagcctggaacaataatgtaattgctgatccgactcccatgattggtttcatgaaagatacgatcggtaccaggataacactgataaatgtcgccatacggaaagaactcattccaccaatcaatgatttcattgctttctttccttctttgtaacgcatcgctaccgatacggtcattccaacccataacggtcctgccagcggtgggaatggtgcaaaaattgcaaggatcaggtttcttaagccactgatcagattagatctgcttgagttaaagtcgatatattcatcacttctgctctcctgcgcttcctctaccagcgtcttcgatgtaacaaaatctccaaacgccagtacataacagatcaaagccagaggtatggcactgataaatttcgaaagcggcggaaaacctaccgcaaagatactgactgtatggaatatattactgaaatcaggaattctgatgactgttccaagttctaatacaggttttgataattctccaagcgcaactcctgccaccatagcgatcagatatgggaacaagttgccgtattttgccataatatctaatatcttatatttacttctgttcttttcacagaacggtgaaaagcttaaaaatgcaagtaataatgtaccggcaagcgttgctaccggtgccgtcataagctggcttccatctgataattgtccctgcaataccgtaatcggtgctgcgatcaggataccacctttaattgaatttggcacaccatttacaaatttgtctgccagtttcgtaattcccataaatataaatacaaatgcgaccagaagctgcaatgcgatcatcgcctggattctgtctggtcctttttcaaacccatttaaatacgccagggtaaatggaagtgtcggagtaatccatcccgggactaccggatctcctaaccatccatgaagcatatacataaatacttcaatgatgacacagctccatgcaagttcatatggaagtccaagattatcagtcaggtacggaatggaacttaaagctgtagcgccaaggatcagaccctgaaaaaattccacatattctactctgtaatggattccaggaattctccactgaaatggtccaagaggaatataaggaagttcattagctctttttgcttttttcggactcatctttgagcgtcctccttcgttttaataatttttacatacaattttttcgtatgcttcaggaatcaaaaatttactataacataatatcagttattccataaaaaatatctatggaataacctgtattttcctctatttcttcgacattttctatgaatgtcttttttttaacaataccatgttaaaagaaagggactgtctatccgtcattattcggaacaacagtccctttttataccaaatatacaagaaaagttgccggtggcaggttttctgtattcttgattatattttacaatgcactctttccgaagattttcttgtgctgtgctactaagtagagggaacttaaaatagcaaggattgcaaatactaataacataatcatgaggctgtatactgcatttgcctcaccagatgcttttgtaagctgtgctgctactaccggaatcaggtagcttgctgcacccataaatgtgtaataaatacctgtgtttcttccctttggtcccgggttgaataactgaaccactgcaagaccagtctgaagagcaccacctgctgcaaagaatcctaacattgcaattgcaatgtagataattgctacctgatgaataaacagaacacctgcaagtgctactgcagtacagatagaatcaatcaagacaactttcagcgggctccattttaatttagccatcatgaatgcccagaaaagtactgcacagatagaaccaatcgtatagatagaagtcatacctgctgcctgcatctcagaaagtccacatacggataatccgaacgcttttgtatactgctgagcaccatacatgattgccatgcaaaggaatgcataaaacattaccagaaatactacaaatttccctggctttgtaagcattgctgctttcgctgcatcgatctctgcctgcactgcatcttttgatttgccatcagttccttctgatgccttcttctgatcatcatatacgaatggtgcgataattgcaagtaccagacagataattgacataactaccggaatcataacatttaatttccagtttccgctgtttgcgttatgtacaaccagaagtggatataccatacctgacagtgaaacgaagaatttgattcctacaagtgctgatccaggtgctgccggataagcttcctgtactgcaggatatcctgaagcatcccagaatccagaagttgcaactccagatgcaaaaccgcatacagaagcaaccagtgcattcttagtaaataagaatccaaggaagcagataatatataacgctgctccaccgatcatcagtttcttacgtccgacacggtctgagatctctccaccgatccatacgcttacgaatttaccaaatccagtccatgctactgcggtacttactgctgcaagtcctgctgcatatgctgccgactgcggatctgacatattgaatccccactgttttgcgaaattcacattattctggcttaaaatgattgcctgaataccatgtgtcagatagcaaaaatatacacagatgatagaccataaatatttctttgctttcattccctcattctcctttatcaagttgttttattttgcctgtgctttctgaaattcctgatactcagcaagcggcatttcttttcctacgaacagcccatagtttactgctccctgctgctgaagcattcctactccgccgattgccttgcatcctgcttcttctgcttccaggatcatctttgttttttccgggctgtatacagtatctgcaacaaccagatccttacggaataatgatttatctaccagtgttacatcctggtgtggtttcattcccataattgtagcatttacaagaatatcacatgctttgattgcttcttccagttttgccttgtcgtcaaggtcgtctactgtaactacacactctgggcacttttcagctaatttggcctttgttccttctgctctttcgaagaatttatctttaatattgaagatatttacttcttttgctccgtccagtgccagctgaacctgaattgctgtagcagctccgcctgctccaagaacaacaacctttttgtcttttacaggtactccgttgagttccagattcttaacaaatccgacaccgtctgtaatgtgtcctgtgatcactccgtcatcgttaacaaatacattgcaggctccgataatctcagctgcaggtgacagcttatctaccagctgtgctgcgatgttcttgcatggcatagtgaagttaccaccacgcatatttaataaacgaatagactcgaatacttttggcatttcctcttctgttacatcaaatgccatataagcataatctaagccatcatgctggaagctgaagttgtacattgcaggagatcctgaatgtccaactggtgttccaaataatgccattaagcctgtatgtccggaaattcttttttccatgatcttaaccctcctggttttcttttattcataacagcccgcatactacgagctgtcacatacacatttcttacaatttctatatataatgattaaagttttaatgccacatcataagcttcttttgtagcatccagtgcacgacgtgctcttactgcatcacctactacatgaacttccggaacgatgtcctttaattcatcagcgaagtcatatacaacattctgaccatcgcggtgtgtataacgggagctgaatcccatagaaagaactacagtatcgaatcctcttgcttcatagatagtctcatcagacttatccgctgcattcttgtagcttactccatctgagaagatttcagatacagcagcgcttgtaatctgctcgattccgtatttttcgaaggcttccataaggaagatacgatgctcgtggattacgtctggtccgatcgcatctctcatctcgataacagatacttcatgtccctgttcagcaaggaaatctgctgtctcggcacctaccatacctccacctacaactaaaactttatgtcctaccggacgtgttccttccaggcagtccacaccatatacgatatcaggattatggatacctttgataaatggaagaactaatgtttcagatcctgttgcgaggataacagcatccggtgtatcttcttttaacatctgagctgttacttttgtgttcatcttgatatttacgccggctttttcgcattttacgatatagcttctgatcatacctgtgatgtcaccttttcccggcgggtaagcagccagtctcatgtttccgccaagtttatctgttgcttcaaataatgttacatcatgtccacgtctcttagctgtgaatgctgcacacatacctgctacaccgccaccgataacgtatactttctttgctttttccgctttcggaagtccctcaacttcacgtccaagtactgggtttaccagacagcaaagaggtttacctgcatacatgttggcaacgcatccctgcagacatgcgatacaaggtgtcatatcttccagtctttcttcctgagccttttccggagtatgaggatcagccagtgactgacgtccgaatgctaccagatccgcttttccaagttttaccatctgttcagcgaactgtggctctgtgtaacgtccgactgtgataaccggaacggatacacaatttttgatatttgctacgagctctgcagagaatccgccatgaattcctgttggagcccacatatattcatctttcagatgcactgcacgtgatacgtgaagtccatcgactccacagtcttcaagataagaagcgattgcacacatatcgtgattatccagaccgccaaacatatcttctgtactgttaatacgtgcaagaactgcgattttaccttctgttctcttctttacttcttcaacgatcagacgggaaaatctcattctgttttcgaagtttccaccaaattcgtctacacgtttgttcgttcttggtgacataaaagaattcacaagataaccatgtgccatgtgaatttctactgcatcggctccgcccttcattgcgcggactgctgcatctccgtatcctttaatgagctcatatacctgctctgtaggaactgcttccggaatatctcttccatcagctgctgcaatagatgttgccgcctggattggtgctcctgcattcttagcatttccttccggacctgcattctgaagctgaatagaaatcttagcaccttctgcatgacaggcatcggtaatcttcttcaggctctcgatgctgttatcatcatacagacaaggttttcttgggccgccctttgcacctttatgaactactgttgcttcaattgtaatcagaccgaactgaccttttgcacgttcagcatagtatgcaacagactcatcgctccatgttccatctgtttttgcaaagttgtttcccattggtggtactacgaaacggttctttactgtcattggtccgatctgaatcggagaaaacatatgtttgaacttcattatttttttacctctctcttttgatcaaatgtgttttctaaattagtcaaccatttctggccaagcttctttccctgccgttttcggaagataagctcctgtttttccagtactgccagagcagttttaaccgtcatctggcttttgtggagaacttctgccagtgcttcaattgtaaagtaaatgaacacatgaccgtctgtatctgaccacccctcatttttctgggaaagccttgcccggtcgagcaggataatataaagcattttggcagtttcgtttatttccatgtccagaaggaaacggggaaacatcatataagatggcaggttggtgtctgctgtcagaaagtcagtcatgtgttcacctccaatcaaaagggtttattccccaagaaaatcccagtctacatcactatctggctgtgaattttcaggtgctggaaaggatgccctgatttggggctccctttgcgccatgcctgcagtcagtccggaaagaaaaagtggcaatgcctgtttcagactgttttccactgcatctacaatctgtttcacaaaaagttcttcccgttctcttgtttccagataaggatcagcctgtgtgcggtagtagcggtcaaaataatctaccagtgcaagagagattacctgactgtaagatttaaaatcctgcctgtccatcgtctgtaaatattcccaggctctccgttgctgttctttgtccagattaaagcgcaggtttgtgttgcggatattgttctgcatggtttatcccctccttttcaggctcatataagccagagattcgtaacctttggcggtggcgcagatgtcatcaatgatggtgactcgtaatttgtcatacgttccgaagttacggatcagacatccaccgccgccaactacatacaggtgcattaggtcaggattgtattcatatttgcggagtgtggaaaaaagttctgccacatactgtctggcaatagaactgatacaatccatatatggtgctgaaatgtcagctgttccaaaccgcagaatctgttctactgtagattcttcaatcttcactccaaatttgtccagaacagcgttctttgcagcaatcatgcattggtttacaccaagtttttctgtccagcatcggctttcttgtgctttcttattgttgatatacagaatgttcatggttccgtttccgatatctgcaaggagattagttcccttgaaatttccaaggtggtttacaatagccggatatccctgtgggtaaaggctacatcccacaaagcggagatgatattctttgccgttgaaacggtaatggacttctggattctggagcagataggaacgaaaagcttctctttgatttctgatccatgtcagaggaagtccggcagccagatgaacatctgcttcacggatggaaaagacattcagttcccttgcaatagccattagcgtcagaagataatattcttcgtccatagctttatccgggataaattctttgtgtccttcgccgatccggtagtaaatgccgttgtattccagaatattcccggtgaagattggttcagtttcataggctttgatgccggttggggtgacggtgtttgctgttttcatattgccgtagccatgatctacagcaatgattttggtgtttctgagttctcgcataaaaaatacctccgttttcgtattgattgattcagcaggtcgtaccggtgtggtactgctctgctgtgggataagcatacgaaaatcggaggaaaaaggcattgaggggaaattgagcaggaattgagaaaaaagatatattgtgcttacgttcttcatgtactcttgttgtgatttcattgttttttatcgtataatatggatactggaggtggtttggatgaaatacaagattttagttgtcgatgatgataaagaattggtgaaaatgctttgtagttattttaatatgaaacaatatgaaaccattacggctacagatggaatggaggcattaaataaaataaaaatgaaaccggatattattttgttggatatcaatatgccacgcatggatgggattgaagtatgtcgtctgatacgcagtaaagtgttatgtccaattttatttctgacagcaagagttgacgaagatgataaaattaatgggttgctttcaggtggggatgattatattacgaaaccatttagtcttcgggagttggaagcaaggattgtcacaaacataaagagagaagaaaggcatcaacaaaaaacggaataccgtttcatggatgaaatgctgattgattattctgaaaaaatagtagctatagctggacacaggatggagttcacaaaaattgaatatcagattattgaattcttatccatgcatccagggcaggtgtttgataaagaacgtatatatgcacaagtctgtggatatgatgcggaaggggacagtagaacgataacggaattagtacggcgtataaggaaaaaaatagcggattattcagaaaaagaatacatagaaactgtatgggggattggataccgatggaaaaaataagaaacttgtcactgaaaaaaacaattctgctttattttgtgatcagcttaacggcagcatttctgttatctggatttacagttcattttgcaggaaatatgcagaataaaatatgggaaaaatatattgattatgcagattatacggacgtgtttcagcaatatggaaagaaatacgagattgagatatcaagacctaatcaatcgcagatgaatcgtttggactatcatctttcggaaatgtgtgactttatggaaacatattcggtactgattttttcgattgttgggagtgttgttgcggtattctttttttataaaaataagttaaagacacctctacaggaactaaaagatgcctcacaaatgattgcagataatgaactggattttcatgtgtcctatgaaaataaagatgagatgggaactttgtgtaaagaatttgaaatgatgcgaagtgatttagcagataacaacagaaagatgtggcgaatgattgatgacgagaaggctttgcggaatgcaattgcacatgatatacgttctccactttccatattgcgtgggtatcaggaaatgctcttagagtttgtttctgccgagagtataaaaacagaggatgttattgatatcttacaaacaggcatgtatcagattgaccgtatagagcatttcacggaaaaaatgagaaaaatgtcccatttagaacagagggaactgcaatgctcagagatagagttatcggaactggcaaaaaagattgaggcagaagctgccatgctgtccaagaaggaaagtaaattatgtaaggtagaaagagtgcaggaacaaaacattgtgaaagtggatgaggaacttgtcatggaagtgacagacaacttactggaaaatgcggttcgatatgcacaaaaaagtattgctttgcagataaagaaaaaggatggttttcttataatttctgttgaagatgatggaataggatttgtggatactgaggaaaaagtaacagagccattttatcataagaatccacaagatgatttaaagcattttggccttggtatgtatatttctcgtattttctgtgaaaagcatggaggaaatttgaaaatatataatgccagacaaggcggtgctcatgtagaagctcttttcaaagctgaataaaaatactttataaggctgaaatcgcaaataaagtggttttagtcttttttgttgtgaatttattgagaattgatttgtatgatgttgttaaagaaataaagaaaggaagagatacaatgaaaacaatcataaaaagaagtatacttgattatttaaagaaccctgttttgtggattggcttgattattatagttgccagtatgtatcaatgtctgtcatcgtatttgcaaattcattatatcaaacagaatgaacagatcacacaaaatgacgtagcattggaagatgctgatgtcatggatgggtacattcccacatctgatgataaagaaagaagaagggagtgggaagatacgatcaaagagacgttaatggacacctccaaaaatggttttggatttagcaggcaggaagcagatcatgtaatgaaagaaattcagaatatggatgtaaagactgcttctgagtttttggaatcccaatatggctattataatgcaatatatgcttatgaggaccttgaaattcataaggggacagcagaagaaatcaatcattatatcgagcggaaattatccgaacattctttttcctggtactttgccaaaaaatttacggattttgcaggattgcatatggccttttttgcaacagtcttgctatcatttttatttattcaggatacacgaaaaagtacctatgaattattacatacaaagcctgttacggcagtccaatatatatgtgggaaagtaataagcggattcattagtatgctgggagtattagtgattttgaatgttatattctttatgctgtgtttgaaaacgtctttagaatcgggctttccagtaacaccaattgatttttgcgtgaattctctgatctatattattccgaatcttttgatgatatgttgtgtctatacaattacagcagtaatatttaaaaatccgcttccggcagcaccaatcttgtttttacacattatatattcaaatatgctgaccatgaagaatgatatttattatatgagaccgttctctattatggtgcgattccctggcagattttttgaaacacatgtagccaaaatgtcaaacataaatcagattattcttgtaatttcatcagttatattagtatgtatttctgttacaatctggaaaaggaggagggttcattgaaaacggaactaaaaaactgcctgtcgttatataagattttttattcatgtgcatttatactgatattgtgtgctattcatccgattatatactatgaagaaatcggttcagcgattcagtcgccaatagcatttttaacaattattttttgtagtgacacatatttgatggaagtaaaaagtaagcgtgccgatgtatttcatttgtatgatcaaaaaaagcagttaaaagtaatatcgcagagagtgggcgttcaaatattatatttattaatactttcctgtgttggatatgttttgtttttctggcaaaaaccgggcagtgtaaacgaaggcatttcgggtattcagatatttcttttatatttcattgcaatgtttggaactatctggctttggagtatatgctctgtgattttgtgtacattgcttcgaaatatgtgggcaggtattggatgtttatttggaattgtcattggacttatatcaaaagcgggaagttcatttttcggaaatctgggattgttttctttcagcttttgtgaacctactcaattaatgtccgagagttggatttatggaacgcttgtgtcttttatagcggggctgtttttatttgcagtattaccaatgactttaaagaaaagaggatagattatgagtattagaataaatgatttaacagttagatttaaaaatggtgtagttgcagtaaataaggcatctcttgaaatacctaagggaatttacggacttttgggtgagaatggtgccggaaaaaccactttgatgagggttcttacaactgttttaaaacaaacggaaggaatggtttcccttgatggaattctgtataacgagggaaattatgagaaaatacagaaaaagattggttatcttccacaggaaatcgacttatatccgaatcttacggtgaaagaatgtcttgtatatatggggggactgtcaggagtagccagaaatgacctcgaacaaagaattacctattatctggaaaagacttctcttacagagcatcagaataaaaaaatgcggcaattatctggtggtatgaagagacgtgtcggactcatacaggcacttcttaataatccggattttttgattattgatgaacctaccaccgggttagatccggaagaaagaatcaggatccgcaatcttttggttgatttttcaaaggatagaactgtgctgttttccactcatgtagtagaagatttagcagcaacctgtacacagcttgccattatgaaaaagggaagttttttatattctggaagcgtgagtgggttgctggaaaatgcaaagggctgtgtttggaattgtacggtacaaaatgcagaagaagcccgtttgttagaagccaattattctatatcatctaagcagtatgtagaaaatggaattcatatgaaagtattaagcaaaggaaagccaaatgagaattgtgtcctggataatgatatcactttggaagatgcatatatttatttgacgaatagttgaatataacggcgggcaagttgcccgccgtaaattatgcttattttgttaaaagaccggatagattttttccaatgcaaaatccaatctgtggatataactcctgaatttcctgatattttgcttcaatcatttctggttcatcagcccagatcttttcatatattttgaaagctcttttaaaatgtgttttggcttgcggaagattggcagtcatcagataaatggggtattttgcgctgtgctgcttttgcatcggaaagagcagtaataaaggcttctttagtagtgttatcataaactgcttcctttttgtccaatattttctgagcatcgttcattgcagaggtaagttcagtattcttggcttccacttctttgactgcagcattaaactttgtttctgcaagatcatgaggctttttcacttgaaagtaccaaacacaaataccgatgacaatgatcgcaatggcagcaatcaatcctagtagcgttttcttctttttcatatgtcttttcctttcgttttttccagagttcatttattcaatcagatatctccgccatacaaatactttcgtatcaagagggcagtgtatttatggttagagatactggattaatcgttattaaaggactttctgattattcatctttaattttgttgcctttgttagacgttctttgaaacgtgttaatttgatagaacgatctgaacggctagcagggacgtcatgtgtaaaaacatcaattgctgtttcaagaacacggatttcattatcatagtcttttttctttctgtagataatggcaagtctatcataaggacaattgccgtcgaaacgatgggatacattcttttcgtagagcgttatggcagtatctacatcttcctgcttttctaattctagtgcttttaagttaatgtcggcaggatcttttaatttatttaaatcagcattatctgataaatttacttgaaaattcgaatcatgtttaacaatgacatcttgatgagtgttaattgcaagctcgcctttgtgggtaggcttggaattttccaaataaccgttctgagttaagaactctttttctttataaaaatctataccgtatttatattcgaagtacgagggtacccttttgttggtatatttctttagccagtacaacatataaatatgaccaggtaacagaccatctggataacgtttcatcatagcttcagatacgagcgattgattaggaaacatttttgattgttcaatccaattggtattaaattctctgtcttgagaaataaaaggtttttctgaatagtctttgtaatacaaatcataaatagtttggcaataagtatcacttgctttgaactgttgcatggaatttatctgcttagcaggtatttgatttcttggcatacttgcagtgcgaggagcgctcgtgtaaagataattataatattcaatacaagaatcaggtagtcgtgagtcgtaattagaaagagaacttttgaaattttcaaaacaattatttttccctttttcagtttttaacttttgggatttagaacaagtggaatcccaataacgttttataaaagtatttattttatcagcttttgcggttggagtatttagctttgaatatttttttgctatattatctccttttacaacaacaattttacgtttttgggcgtcagcaagtatagatagtttttcataatataaatcaaatcgagagaaaaatacatcaggattgactgttttttcaattaaactggcgcaatcattaagtattcgtaagtcattttgtaattcaataacggataaagaaggttttttgttaaaaaaattaaacaatcccatatgatacctccatattatattagttctgcaattgtaaggtgtggaataaagtagattatataattatctacaatagttagtatgccatatttatctctatagcacgcaatgcagttttctaaaaattcttctgtaacatccaaatactctgcaatttcatatttatctttacaaccatgttcgtaggctctgatcagaccgaatagtccgatactgcggttgtatccccaaagccttgcctgccgttcctgttttcgattaccggtatattccatgtcgataatattaccaacagaagtataatgatgaccgagttcttctgccagaacgcaggctttttccgtggttgtatctatattgtctttgatagcaatggtaccatcacaatataatccctttatttttttgcttttaaaaggataatcaataacatctataccgtctttgcaggcttcttcctgtagcttctcgtatgtattcatacaaacacctcccgctcgagtatatcagataagctgtcctataaattacttaactcgtttattctttacgaattcagcaaactgacggatttcatctaattcagattctgtgtattcatcaccatcgaagtgagctgcaagggtagttggctcatcttgtgtgaaaacaattataccatctaccagtttctcagaatctaatcccaactcacgtgtgatttttaaaacatttgttatgttggaattggcaatacctctttttagaatactatctaaggtagtccacggcatatctattttttcggaaaattttttcatacttccgtatctatctatgatgagtgctttcacattagattctaattcattcatgtaaagttaactcctttcttcagttgatgatttgataatagcattaaaatctcgaaaaatcaatatactgtcaccgaaaataaaataaaaatctcaaaaaatcgagaaaaacaggttgacattctcgaaaattcgtatatactttaaagtgcaatcacgaaaaatcgagaaaagaggtgagaaagtgtttccgaatttagaagccgagatggcaagaaataaagtgacgcaagtaaaacttgctgaaattctgggaattacgccaacaacgttatcattcaagatgaacggaaaaagtacactttcattaaaagaatgtgtagaaatcaagcgaaaagcatttccagacaaaacattagattacttatttgcaacagatgaaacaggttcagagaaaggagagtgaagaaagagtgcaattagcaacaacaataatttcaacaatatcggcagtttgcaacatttacctaattttctatattaggaaaatgaactaaaaaagattgatgtctcgagaaatgatgaattcgttcttgcgcagttatatcaattttcatggaagtatatggtgaatcaaaataatatccgaattcttcagatgtatgagggtaaagtacaacttcatccaacaatggctctgaatatttgtaatccggaataatatccgaaagtacatgttgaaatggacctgcttcagaatatgtctgctgaggttcatagcttgttaacggatgtaatgcgcttccgtttggagaaaagaactgaatatccgtgatagtaacagatacagcagaaacattatgaattgtgaaccaatggattggtggatctggttcttcgaaatatagaacatcggcatggattttgatttttcgtctattgcatttttgcgtgtagtaaatactatacgcagaaagtaagagagccaaaagcgctattgcaaaattcaattcatcgagggacaggcttttgaaaacattaattatagaagccataaaagtactcctttctttggaaacttgggtactggcataccctgtaagaaaagtataagagaaaaaagggagaaagacaatgtcaggatataattttaatcattttacaggaaagacaagaggtaaggcttcgagaaagaaaaagattcgaatgaaacaaaatcataaagataagtatgagaaatattccaataacagaggaatagtgaggtaagtataagagtgaagaaaattatatttgtattatttgcgtgcttaatcctcttaacagggtgtagtcagaaaataacagaaggagagatatatgaaaaagaatttcttccagaagaaacaagaacaattataataccgatgattcatacgaatgggaaatcattatacacgacatatgtgccggtaacacatcattatccagatagatggcgcatttctattaaatcgatagagaaaaatgacgatggcgattatgatacagccgactactatacgacggaagaagtatataacagctgtgaagttggagatatgttttcctacgatgaaaatagggactgtgaagaggaaccggttgagaagagtaagtaatgcaggaggtgcagagtgcaaggatattacgattcagaacatagcggaaaaggattggaaacgccaacaggacaattaaatattaacgttaaaaatctaccagagtttaaagaattggtagaacaggcaaagcatcaagccgaccaattgcaacgaacaattaatcagcttagttactttgaattgaaaatcgattttagctgtggtgaagaagttacttcggagtaatagaagatacactcttggtgactcatttgataggaaaatataccagagaaccgcaacaagtacaaaccattccacataacctataaagaggtgatgcagtttgaaacatatatttattttaagacttatacgaaaagaagatggaagtcttatttctgaaagagatatggatactatggcggaaaaagataaggatgaagccgtgaatgagttaaacgggaattctgttggatatttaggataccagaagtagaaaaccgcttaggcggtagaagggaggacaagcatgaaaagaagaggaccaagaacaaaatggcagagaatcatcagagaaacggtgtttgagatcctgatcggcgccgcaatcggacttgcatttgatgtaatgttatttatctggttgcttgtaaggtgaaggaggtgagaaaaaatgcatgagatacccaagatactgacagagaaagaatttgccaagcgactgcagctggccaaagaaactctgaacgaatataactgtaaaaatgacatcgaaaaaggcttaatcgtaatgtccggatgggtaagcgctgatggccaaccggtatatacaccggcacagcttaagagactgtttgatctagtttacaaaggagatgataccgatgggacagagaatgtggcagacgccatctgctaagcaggagtgcaggaactgcgcctacatgagagatttgggcgatggagagtgcatatgcgggaaagacccatccataacggtcatggaagagtaccaggaatcagaagactacagatcctgtggatgcccggaatggagatggggatagtgatacaagtgaataaaaaaataaggcacatcattatgcggatgatgtacctcaagacttcttcgcctaccgaaaatataagtcaaaatcataataccatcggcgggcggaaaagtcaagaaatacgggcattttcgtccgttttcatcacttgttaagaatattaaagataggacatacaggtggatgaaaaagagatataaaagactgatatatacgtttgaacattcggtagaggtatatgaatacctggatgggaagtatggagcaccgggaacgaaaagagggaagaagagaaaagccacattggaagagatccgattccggaatcagtggaatagagaaagaaaagcaaggcataagctgaagacgtggttccatgagaatgattacctggtattgttcacatacaaaaagaataagcgtccacctgatatggagactgcaaaaaagcatctggcgcaagccatgaggaaggtgagagaaaaatataaaaaagctgggaagaaaatgaggtggatggcaaatatcgaagtaggtacaaaaggagcctggcatgtacatatagttataaatcggataccggatgcggacatcatcattaaggatgcctgggagcatggagcagtaaccttcaagcacctgtatgaggcaggagatttcagagatctggccggatacatcacgaaaacaccagaaacatgtgaacgctatggagaacacttgagagagacaagctatcatgcgtcccgcaatatgcctctgaaggaaccggaagaagaacgctttgtgcaatggagagagatcaaggacaggaaaggctactacttagataaaaatacatactacgaaggaacaaataaattcaccgggtacaaataccggtattacaccatgattaagttggataggaggatttaaaatgctgattttagatagagcaagcgaaaacaaactggaagagctggtattagtatctcgaaaactcaatggagtattgagagaaatctacccgggagtacataagattgaaccggatcgcgccgctctactgtggtgtgcaatcgatgatgaaattgaaaaaagacagaagcagatcgacaagattcttgcgacggagagcggagcagaacagattgtactacggagagcctgcagtgagttaaaaaaagaatacgaacagtacaaccagttaatggaagaactctatggagaagaacttctaccagccactattccggaactgctgattggatccgtgaagagagcaacactggagatgaaagagtcgaaccaaacactgcagaatatcaaagaggcaatgaaagaacatgtttagagtagatatttacatagtcacaaaatgcagttccaacagtaaaacactgggaaaatatggattcgtatgcacctgtgctaagaagtccggagagattggaaaaatccaagataccggtcagataaaaggcacacgacacgaaacagaagtaaaggcgatcacagaagcattgagccgcctgaaccagtcatgcgaggtccatattcactgtgaggatacgttcgtggtcaacatgatcgactatcacattagtggatgggctggaaatgacttccggaaaaccaatggaacaccgatcgccaacgcagaaggctggcagaagctctgaaagaagatgcaggggcatttgatcaggatgaaaaagggacgacatgcatacagcaacgaaattagaaaaacaatggaggatacatagatgtttgataaatttggagaatttgactctgctgacgaaatcaacagggaggcagcagcacagttaaaagaaggggatctggacgctattaagacaatagcagaagaaaatggcttagatccggaggacgcagaggatttttgcaccggtgcaatagattctctgactactccattactggcagcgatcgggaaattggaaatggaatcgaaagatttaggactcaaaaacatgatggaagactggaaaaacttcctgattcagatgtgtgaagaagatgaccagatggcgcaagctgtacgtaagaaaggaaaaagtcttgaaaaatgtatggcacagatattaaaagtatcgtttgaaacgaaagcgcaactggatgatagaatcgtacgggcagcaggcttaaaaccacctatctatcttggaattcctggaaaagcacagattagaaaaattgcagaaaaatattataagggtgaagaaaaatgagaacatacaaaggattcacagaagatctgaaagcaacctacgggaacggaatcttccaatacgagcctggaaaaacatacagggaagagaaaagtaaaaccagaagtacaggcttccacgctgcagaatatctcccagactgcatgatgtggtacgggctgaacgataaaagccggttcttcttgtgcgaatcaggaggaagtatcgatgaagaggacggctgctccatggtagtatccacggaattgacgctgatcaaagaactggatctgctggatatcgccggccacaccatgatgtacatggtcgagcacccgcaaagaaaatggatcagtatggtgggtggagtaatgatcacgagcgatgctgcacatacaggagcaggcagactgcttgcaatagcaagaggagaaagaccgatcgtatacgggattgagggaacggcggtcggatggatccttgagagcgaaggaaacattatagcggccaaggttggcatagtaggacaagctggaatagaaccgggagtaaaatatacgatcacagccaaccgggaactcgtggaggtgcaagatgaaacggaaagcaattgagaagatagaaccagcaaagaccaggaaaaaagggcatatcgcgacagtccagacattagacgatattgcaatcattaatgtattcaatgacaaggttctggcagtgagatactgcatcaactgcaaaacaggagaacacgaatattggaccgaaaagaatggctggaagaaaggaaaactcataacagcaatagaaggaaactggtacgaatgggtatggatgaaacatgattataagtatccaaagattgcttcagaggaagatagaaagagactcttggatataacacaggataaatattgcgcaaacgatgtatggagtcggatagatcacatggaatacagttacgattatgacattcggcagactgcagaacataacagaagagcgaagataaataatttcatgatcaaagcaccgaagcttccgaaagatgcagatgaatggttctttgaaaaaacaactggcgaggattatatgtttaaagaaaaaggaacagagaacttcagctgtacaaattgtggagaatcatttgacagatctgagttgacgccgatacatcagggcaaaaagaaagcgactcacaatgacatggtgcgatgcccgtcttgcgggaaactcgttcaggtaaaaacgagaacagatcatatcacagcccccccctgagagcttatataaacttgataagatcgacgaaacagcaagtgtattaagaatcttccgtgtagatatcgaatgggattccggaaggcatcggatagaaattgatgaagaaatacgcattgtgatatacaaacaggacctctttaagagcaatagatacaattacaagattttttacaatatcccatgggaaggatggcataaaagcaacaacctgaattaccgggcacgggatggctatatgtatcctggagattacaagggaacgctgaagaacaccgcttatgaagatggcacaaggatcgtggaattcctggcagcagccggttggaaattaaactacaaccgtctgctatccggagtataccaggtaaaaggttacgcagaaaagatagaatatctggccaaaggacgattccggaatctactgagagaaactgttgcatgtacagaatatccgggatggaacatggcatactacggaccattagacataagggcaaagaacataaacaaaatgttctacatcaacgatcggcaaaaaatcaaccggatccgtgacgaaaacggcggaaatgaaatggttcgctggatgcaatattcagacgaaacaggagaaaagataccgacagaaactctgagatggctgctgagatgtggacttgggccggaggatattagatatcatgccggaaagtatctgagcactacacagctgatgaattacatcagcaggcagcagaaagaacagtatccgggattcacggaagaagctgtcctggagcagtacaacgactatctgagcatgtgtaaagcatgcaacaagaatatgcaggacgagcttacatatcggccgagagagctgaaaagacggcatgatgaaattgtgatcgataaacaacagatggatattctgaaagaaatgatggcaagccaggcagaaagagaacaatatgctcaggaaatgcgggagaaatacccgacagcagagcagaccttacacgagatcaaagagcgctatgagtacgaaaacgaagaatacaagatcatcgtaccggaatcactggtggatatcgtaaaagaaggacgtgccctgcatcattgcgccggcagcagtgagcggtattttgacaggatcgagacaagagaaacctatatctgtttcttgagaagaaaagaacaggaaggcgtgccgttctacacgattgaggttgagccatccggaacgatcagacagcaccggagctacatggatgaagaaccgggaattgaacagatcagagatttcctgaaggaatggcagagagttctgaagaaacgtctgaccaaagcagacaaggagctggccaagatcagcaaagagaagagaaatgcaaatatagaagatctgaaagcaaagaacaatacaagagtcctgcagggactggcagaagacttcatggacgcagaagaaatcgaagaattattagaaaaggcggtataagatggacgagcttataaattacaacgggtatgaagagtttaaacaggcagtaaacagagtattaaacagaacggtggaggactttgtcctcaccggttatctgctgaaacaggcaagagatacagacattcttcaaggttccggatatgcagatgaaaaagaatttgcctggagcgaatacaaactggacacctctcaggtatcgagatatataaaaatcaacgataaattttcagaaggtggctattccccgaaactgcaggaccagtaccaggggttcggttatgcgaaacttgcattaatgttgacacttccggaagaagtagtagaagaattgacacctacatacagcaaaacagagattcaggcagtaaaagaggaaatcgaagaggaagagaaaatcacagatatcgaagtaatcctggaaggacagaaggaagaacagaaagacctcggcaatctggaaaaagcattgcaccaaatattccatgatgaaccggaattatataaaactatgtacgaaacagtacggacaacctgcggaacaaaatatctgcaggaagtacttgcaccggatggagataagatctacagcacacgcattcagggaattggacggattatgctctatatgcatgagtcgaaagatattacattgcacatggtccggtcgggagataaagagttctattcctgggacgatgcattgagctactgcacaatgatcacagacggcgaagatgcggaaaagacctgggaagaggtgtatggagaagaattcccgaaaaaagaagaaattgcaccggtgcaaccgaaaaagagaaaagaatccaaggtggtaaaagcgaagaaaccagaacggaaatctataaaaacggaacgatcggaaacaaaaccagcagaaccacaaacaaaacagccggatccaccgacaaaaagcgaggaattaccaacaaaaaatgaagaaaaacaaactgagacacctgacaccactgcagtacctgcagaaacaaaagagaaagagtcagaaaaggcagaagaaactccggaaacaaaaaccgagttccaacaggaaattactgatgaaactcagattccggggcagacagaattaatcaaagatttcccggaatactgcccgccggatatgaatactccggaacaacaggatcaatcagaagtcaagccggcatatgctacaagaagaatatatatagcatctgtcgatgccgatacggcagcagaatacatgggaaaagccatggaaaaggcaatccgtaatatgccgggagtaagtttcggagtcttgacgaaggaatcattctggaaagaattcttcgaaaccgaggttgatcggaatggagctgagattgaatgtgtgaattaatgtttccgaagccaaccaagaagaaaaaaagaaagcaccatccagctccgatcgtggacaccgtaaaaggcgaatgcttcctgtgccgactggaaggcatccgccggcagcagtacacagaagaacaccatgtattctacggtggcggattaagacaggtaagcgaagagaatggcttcaaagcctatctgtgtccggctcatcacaaagacggaccgagggcagtacataactgcagagagaccagagaactgttatgccggatattccagagaaagtatgaagaaacccatacgagagaagaattcagagcattaggcataaagaattacttggaggatgaaaatggatagagagatattatttaaagcaaagcatgaacatgtagtagtcgcaaataaagacctggaagggcaatgggtagaaggtcttctctgggatgaagactatatttatagcaaagacctggaatgcgaaatgctaattgacaaaaataccatttgcgcctatacgggattgcatgacaagaacggcaaaagaatatgggaaaacgatatcctgatgtgtcacgacaatccgaaagatcttgtaaaagcagtattcggagagtttaacgtcatagaagtggaaagcgaagaagtaatagacagtgtaattggatggcattacgaagtgattccgacggatgcgctcagcaagtgtgaaccgttctgctactcaatgccattaacagacacgtatattatgctgaatgagatggaagtgataggcaatatatttgatgatccggaattgcttgaagaaagggatagaaaagatgaaagaatggaagaaacagaaagaatatgacggaacaaattcatatacgcttatattcggccaccatctgaacaagccaaagaacattctgtgtttattcagaggagaaatgactgatgattggtatacaacatcgagcgtgcttagaactaattggacatggttagcatctggaacaacaacggatgatgaagcgaaacttttggtagaggaaatgatacaggaacactatgaaaacgaaataggatattaccaagaaatactggatgaattcgaacggggtgataaaaatgagactgattgatgctgatgcagagataaagaaaatcgaagaagaaatcgagcggtcatacaaagtcattgaccgatggagatcaggaggaatgcctggcagcagtctatatgacatagacgaaaaggtacgaagaattgagaaaaacatagaaaattgcagaatagaaatcaaaatgctgaaaagctacactacagcatacaatccagaagcaattgtaaagaaactggaaggcaagatagaatatgccggaagattaatggtagaaaaaccggcggataagcttgatgaaattgccaataatacagcagaagattacatacaggcatatacagaagcgatcgaattggtgaaaggcggtggaaacattgaacagccaggaatatgaccagatagaagaagcggccaatagactgcaacacgaagcaagtgtcaaatgcagcagagagcttgaaaaagcccagaagtataaagaaggttatacacagggagtagaggatctgctgagatgcataagaagaggtgaatgacatggagataaaagaaaaattaaaacactggtccataatggtactgacaaaccggtgcctgggatgctgcttattctgcgaatggtgggatatgtgtaaatgggaaacggaggacaggagaaagaaatcatgatacagaaacacccaaaagattggcatgaagtacttacaaaagaaacggagagataaagaatgagtttacaagaatgggcaaaaaatgaagttgaaatcgcatgcaaaagagaaaatccggatagaaaagaaggcgaatttgattatggatgcgcttgctacgaaagtgcattaaaggcatttgagagcttatgcgaagatggtcacagtggtatgagtatcggattcacaaaacagattttgaatagactgatcgatggaaagccactgactccgatagaagatacagaggaaatgtggaaaagatcatggacagatgagaaaggaaaacattatcagtgttcgagaatgagtagcttgtttaaaacagtaactccgaatggagaaataaagtattcagacattaataggtgttactgtgttaatcgcaatcatcctaattatggataccacaatggatttatcggaagtatatatgatgcgatgtatccgatcacgatgccatacgcaccggcggataaaccggacaaaatagtttgtgatgagttactcacagatcctaaaaatggagattatgatacaaaagcaataatttacatagaaaaaccggatgggaagaaagtgaaaataaacagatattttaaagaatccgaagaatcatttaaggaaatatcatggttagaatatcaaatccgcagatacaaagactggagaaggaggaagtggttaggaaatgacgaggaaagacattcttaaaaaatacggattcagctggatgagcaatgtcaacctgaaggaagaactttcggaacaggcggcagcagaatttgaagatttgataagaaacctggccgaacataaccgtggaccagcaccaccagaaacaggctggaagaaacggatgtacaaccaattcatgaaaggagcaggcagatgacacgaaacatgatcatcgggatatggctaacagcattcctgcaccctgtaattttcccatgcgtcctacacacagcaaaggagatggaaaaatggtgggacaagaagagagtactgtggcacgtagagcagctccggaagatagaagaaaaatataaagaatagcaccaactggcattgtatcacgaataaccagtcaacatagaattccctccggcatcggccggaggagaaaggagaggccgtggcaaaagaagttaaggagtctccgaataaagacagacacctgtgtaagaaatgcgtctacaggtcagggagaaccggaatgggacgctgtaactatatcgcagttgcaggacacagcagaggctgtaagccggaagaatgcacagtatttgtaaaggggaggaagcgcaagaaagcgctgtggtaaaaaacatgtgtgcgatatcgcacagaaaggagaaccatgaatcatgaaggttatcaggatccgacagcagaaagggcgttgcgcagacacaaccagatgccctaccatatgcgcagggcactgaccgatctgcaagacatagcaagtttgtttggatttgatatcataacaatcaaggacaggcggacggggaggaagtatagagttgaagagaagaccgatcaataaagataaatatggaatcagcaaacacaggtatctggaggtcatacatcattgcttacaatatccggaatggcgggaagaacttgaaaatatgacagatactgtgaaagcaatacaatatggccaagaaggaaaggggagtccaagccaggcatcggctacagaatgcctggctatcaaacgtgcggagctacaggaaaaatgtgaacgaatcgagcagacagcaatagaggcggatgcagatatctatcagtggttattagaaggggttaccacagattatgcgacttacatataccttcgggatgccaaagggctcccgtgcgggaatcagaaatattacagagcaaggaggaaattttactggttgatgtcaaaaaaaatataaaacacacaaaacatcaccactcacggcacataaaagtgtgttattatgatattgtccgaaaattgaaaaggacatattcaccctgaaggtggcagcagatgatgctgccacctttttacgtgaaaataaaagataaaacgagattgttgaaagataaaaatcaaaaacgaaatgaatgaggggtggtgaggcgtggcaagagcacctgatcagagggctgttgaagcaaaagaattatatgacaaagggatgaaattaattgagattgctaagaaactggatgttccggttgggacagtccggagctggaagaacagacagtgctgggataatgcaacgttgcaaaagaaaaaacgcaacgttgcgaaaaaaagaggcggtcagccggggaacaaaaatgccaaaggacatggcgggacaggaccgctgggaaacaagaatgcagttaagacaggagagttcgaaactctcttttttgataccctgaatccggaagaactgcagctggccgagacgattggactcgacaaagagcaactgcttttacaagaaatacagctacttacggttcgtgaataccgcatgttgcaccgaatagaagcattgaaaaatgctgaaacacagcaaaacgaggatgagaagtcgccaccggggatgacggtagtaaaatacaccgatggactggaaaaaggagactgtacagaactaaaagaatatgccggaatacttggacagatacagcagatagaagatgcactcacgagggtacaggccaagaaacagaaagcaatcgaaactatccataagtttggctacgatgatgccaagttagaacttgctacgatgcagttagaactccagatcatgaaacaggatggaggatcgcatgaaacagcggacgacggattcatggatgccatgaacgctacagcttcagaagtttggggtgatcaggatgtatgaaaagatcacaaatctgaagaaaaagatccaagatatgaagaaaagccgtctgcagacagtatataaccaaatattcaagttcaaaccgttctcaaaaaagcagaaacaggtgctgacatggtggtgtgcgacgtcgcccgtaaaagattacgatgggattatagcagatggagctatccgatcgggaaagacagtatgtatgtcgctatcctacgtgatgtgggcgatggaaacgttcaacggacagaatttcgccatgtgcgggaaaaccatcggatcatttcgaaggaatgtactgttttggctaaaactcatgctaaaggcaagaggctacggtgtggtagaccacagagccgacaacctgatagtgatcacaagaggaaaaacgaccaataacttctacatattcggtggaagggacgaaagctcccaggacctgatacagggaatcacactggcaggagtcttctttgatgaagtggcgcttatgccggaaagttttgtgaatcaggctactggccgatgttcggtagatggatcgaagttctggtttaactgcaacccttccggaccttaccattggtttaaggtcaattggatagacagagccgttggatacattggaaaagaacgggcagcagagttaagggcgaaagatgaaccggtcaagaatatcctatacgcacatttcgtaatggacgataacctgagcctcagtgaaaagatcaaagaaagataccggaatacatacagaggagtattctacaagcgttacattctcggcctgtgggcgatggcagaaggtgttatctatgacatgttcgataatgaaaagcatgtggaagatccgaatgcattccaaacaaagctgataaatagcaatagatacgttagttgcgattacggaacacagaatgccacagtttttctgctgtggaacaaaggaacagacggtgtttggtactgcaccagagaatactattactctggacgagacaaaggaaggcaaaagacagatgcagaatatgcaaaagatttagaaagctggctggatggaacagagattaaagccgttatcgtcgatccgacagcagcttcatttattgctgagttgagaaaaagaggatttagagtaataaaagcaaagaacgatgtagaagatggtatcagactggtgtccacaaagttgaatttgattaaaattatcttttccaatgtttgccaaaacacaatcaaagagttcgcatcgtacatttgggatgcaaaggccgctgaacgaggggaagataagccgataaaacaatatgaccatgcaatggacgcagtaagatactttgtatatacaatctttggggataaacctcgtttaaatagaaacctgaaaggaggactataaagtgttatttcgattgccgtcagaggaagagctgacagataacaaattgaatgaattcatagcaaaacataatgcagagtgcgcctttcggttcaaacatctgaaagatgcgtatgaaacagactaccagatttttcaccagaagccgaagccggattataaaccagacaatcgtattgctgtgaactttgcaaaatatatggtggatacatttaacggatattttatcgggaatccaattaagatatctgtggatgatgatgctgcaggcaacatcaaaaaatatgtggagctcctggatcagtacaatgatcaggacgataacaatgcggagctgtcgaagatctgttgcatttacggaaaaggatacgagatgtattacgtggatgaactgggaaatatcgggattacatatctgacaccgtttgatgcttttatgatctatgatgattcggtattgtgcagagaacgatactttgttcgactgtacatagattcgaatgacgttttgcacggtagtgtatccgatgcggagaaggtacgttggttcacccagaagggaaagcttatctgggaggaagaagaaaagatacatggatttgacggggtgccagctacagagtatgtggagaacaaggaacgcacatgtatctttgaaccggcaatctcgatgattgacgcttataacaaagcaatcagcgagaaggcaaatgatgtagattattttgcggacgcgtacatgaaagtgcttggaagcaggctggatgatgatgatttagagcatatccgcgataaaaggattattaatctggaaggagacgccgatactgttatagttgattttctgcagaaaccaaacggagataccacacaggagaacttgattgatcgcttggagaaattgatattccagatcagtatggttgcgaatatctcagatgagaatttcggtacaagctctggcattgctatgaagtacaagctgcagggaatgagcaatctggccaagacgaaggagagaaagtttacgtccggaatgaatcgacggtacaagttgatcttttccaatccagtatctggaatgaaagaagatgactgggtgaaactgcattaccatttcaccccgaatattccatcgaatgtactggaagagagtcagatcgccggcaacttggatggaatcgtatcacaagagacacagcttggtgtactgtctgtcgtggataatgtgcagaatgagatggaaaaaatcgagagcgaacaggaaaaagccaagacagatcctgttatgacacaaatgttcggaggtgcgggtgatggcaagccaggagtactggaagaaccgggaaacggaagcaaagaaacataatatcatagacgaagaagagtataaccgccagattcaggaaatctatcaatccatgatagatgaaatcacaaaggaaataaatgggttctatgccagatatgccaaaaaagaaggcattacgatggcagaagccaaaaagcgcgcagataagcttgacatcgatgcctatgccagaaaggcaaagaagtacgtggcaaagaaagatttctcggatgaagcgaatgaagagatgcggatctacaacctgactatgaaagtgaatcggctagagctcctgaaggcgaacattggcctggagatggtatcaggctttgatgatcttcaaaagtatttcgataagaaactgacaaagagaacactggatgaattccggaggcaggcggggatccttggaaagagtattatgaaaaacgaaaagtatgctcatgcaattgtgaatgcatcgttcaaaaatgccacatattcagaccgtatttggatgtaccatggtatgctcaaagcagagttggaaggactgcttgcatctggactgattaaaggagagaatccgcgtaaactcgctagacatctaacgaagcgttttggagtatcagcctataatgctgaacgactcatggtaacagagcttgcaagagtgcagacagaggctcagaagcagtcttttatccgtaacggttttgatgagtatgtgtatgttgcatgcacaaaaggcgatgtatgtccgatttgcaaagggctggacgataagcatttcaaggtagatgatatgatgcccggtgagaatgctccgccaatgcatccgaactgtcattgcagcacagccgcatatatggataatgaggcttatgaggagtggataaacagctatcaggaacatggattgaatttcgaagattggaaggcttcaagggaaagcgaagaaagtaaaaagaaatataaatatgctgatacagttgtgaagaaatcacttcttacgtcttcggagtaccgaaagaaattcaatcaggtatccggcaattcaaaggtgaatcgtagagcatggaacatttccaaggatatgctaagtcatagatctggtacaaagtttgaagatttggcatttatcaatgtagtcaatgggaaatatgcagtgaacaaagactatgatgtagagagcaaggcaaatatgaataaacaaatgaagcagttgctggaagaatcggagccagaaacgattatcgcaatacataatcatccaggtagcagcgttccgagtcttgcagatttgatgacttgtgtgaaacgagggtacaattttggactggtagcttgtcatgacggtaaggtgtacaaatattgggtagataagaataaattcaattctgtgaatgctggatttgcccttgaccggatggaaacgcaagggtatgataaagaagtaagaacatggctagaacaagcaggagtgtatttggaggtgtggtagcatggatgaagtgtataaaagaatatgcgataaattgggttgtgaacctaaagatattgcaattccggagttcaatacagaggatgattcatgggaaagcccctttaaagtattgactaatgaagaaatgaattatatagtgaatcacggctgcctgccaggaattgaaccaattcaaaagtagcgatgctggaatatcttnnnnnnnnnnnnnnnnnnnnnnnnnnnnnnnnnnnnnnnnnnnnnnnnnnnnnnnnnnnnnnnnnnnnnnnnnnnnnnnnnnnnnnnnnnnnnnnnnnngttgataaagaatatgaaagaatatgcaaaaaactgggattcattccatcagagtataaatatgatggaccgatagaagaggacgatacttgggtaaatccattctcggttttaactgtagaagaaaatgattatctgtatgaaaacggatatttatatcagaaataagtgtcactagttaaaatgagtagaatggatatgaagtaatgtggtatggaaaaatgacacaagagctggaaaagctatatgacgattattacaaaatgttcggtcgtactcctgatggatatatggagctggaatacggagaaggctcatataaagcatatgtgagagatattaaaaaatcattaaagctgaaaaaagaattgccagagtttgtagaataagtgtaaattacttcaagagtaaggaagtgagataaatggctcaaaatgattattttgtgattgtataccgagttttaaagtacctttacgattgcctgaaaaaaggcgaaaagccagaagttgagtatttagttgcatcgacgtacaatattccagaaaattattggatatacattcttttaagcttgattaacgaagagtatattaaagggattagggttgatcccacaaaagacggagtaatttttggtgatttgcaagaagctattatcactccaaagggaatagagtatttatttgaaaattcattgattgagaaagccaagaaaacattgaaagatgtaaaagatatgataccgtttatttagaaaagccactgatcataatgattggtggtatttttatactcattttagcacaaggaggtgacaggattgcaagatatgaatgttagtattatggggacatgttacgatattcgttttgtagacgagtatccggagcgattgaaaggcgtgggagaatatgcagatggtttgtttaatcgatgtaatagagaaatttatattttaaaaaacaaggataaagattttacggatgaaggaagaaaacgacatatgaaccgtgtgctgagacatgaaattatacatgcatatttggaagagagcggcttatctgcaaactcgaatatgatatccgcttgggcgcaaaatgaagaaatggtggattggttagcaattcaatcatcgaaaatctttgccacatttcaggaggtgggatgtcttgattgaagtaactgtccgcaaggatgaaataaagatatccggacatgcaaattatgctgtttccggatcagatatcgtctgtgccggtgtaacagcacttgcactgacactgatcaagtccataaaggacctgacagacgataaaattgaatatgagatatctcccgggagggtggatataaagtatgggaatctattagagaagtcgaaaactctggtggattcctttttcattggcatctgtatgattgccgaggagtttccggagtatgtccggatcatgtaacttaatgtgaccgggatgtcgttaaactacacattcaagatgcaacgacctgggcttaaatgaatggggcggggcggaaaggatagataagatgaaacacatgaataatcactggagaattccaatgagtaacctgcagttatttacagagcctggaggagacggcggtggatccagagaaggagacggtgctggagctgggggaaatcctggaaatagcggtaacacaacaatgtcatttgatgagtttttggcactggaaggcaatcagtcagagttcgaccggcgtgtccagaaggctgttaatacggctgtgacaaatgcacagaccaaatggaagacactgacggacgataaagtgtcagaggctgaaaagctcgctcagatgaccaatgaagaaaaggcgaactaccgggcgaagaaagcggaggatgctctaaaagaaatgaagcgccagaatgccagatcggacatggcgaaagaagctcgcaagatgctggcagatgaggatatcaacattccagatgaactggttatgaatcttgtagcagaagatgcagatggaaccaaggcggcagtggaaaccttttctactatgtacaaagaagctgtccagaaagcagtgaaagatgccttaaagggaaaacctccaaaagccggtaacggtggagataaaccattaatgacaaaagaacagatcttagcagtgaagaatccgtcagaaagacagaagctgatcgctgagaacatcacattatttcagtaagaaaggaagtatgaaacatgcatgatattagaagattaggtctgcaggtatttgcagcaccgaataacctgacaggagaagtgcagatcgaggtaaaagccagagagattgactttgttacatcctttggtaagaacctgaaggcactgttagatattctgggaattaccagaatgatcaggaaggaaaacaattcggtattaaagaccaaaacggtaaaaggtgaactgcagtcaggagatgttggagaaggcgaagaaatcccgatgtccagatacacagtagaagaaaagccttttgatacgatcaagattgaaaaatatcgtaaaggcgtatctcttgaagccatttcggaaaaaggttatgaggcggcagtacaggatacggatgatgagttcaagtccgatctgcagaatgtagtgactgataaattctacgcacagttaaaagccggatctcttacaggacacgaaacaacttggcagatggctgttgcaatggcgattggaaaggttgtggctaagttccagaagatgaagagaacggcaaccggagtagctgtttgggtaaacactctggatgtgtacaagtatctcggtgcagcagatattacactgcagactgcattcggcttcaagtatctgacaaatttccttggggcggatgtggtatttgttacttctgaggtcccgcagaatgttgtaattgcgacaccactcaacaacatgattgcatattatgttgatccgggagattcagagtttgtcaaagctggacttggattcacaacggattcagagactggatttattggcttccacacagaaggaacatacagccgtatgatttccgacaactacgcaatcatgggcttacgtctgttctgtgaatatttagatgcaatcgcatacatttctgtaggcgaatctgatacacagaccttaggaacattaagcgtaacgtcagaggctggatcagaagcaggaaccacaaagctgacagtgaaagagcagttaatgtcaatgagaaactgctggaagtacaaagatactgcagctgcaacagcagtaacttacggcatggatgttaagaactggtctaagtgggacggtgaatcagagattgcttcaacagcaactcaccatatcacactggttgagtgtgatcagaactacaaagctgttcgttctggtgatgtagctgtaacggtcaatccaggagcataggaggtaaggaagtatgtataaggtaatcaaacattttatcgatctccatgataacgatcactcttataacgagggagatatcttccctcgtgagggagtagatgtcagtgaggaaagaatcaaggaactggccggcagtgacaataaacagcacacgccgctgatcgaactggtggaagaggatccggacaatacagccgacacagatactgctgaaaaaccaccaaaagccgggaagaagagatctgagaataaggtgcccgaaaataaagagccggcagaataggaggagcgtatgattgaagatctgaaagtcttgttgggactgccggaagaaatagacggagccttagaaaataaattgctgttaattttaaaggctaccaaacaaaggctgcgtttccttcttggggggttagagcctccggaagagatgaattatatcattctggatgtgtcaatcatacggttcaacagaatcggttcagaaggactttcctctcacagtgttgagggagaaagcctttcttggtcagaaaatgattttgcgggatacatggatgatatccgggcatatctggatgatcagaaagaatcaaagaaaggtaaggtgagattcctatgagatatgacacacctatatacttccagaaactcacccctggagagtatgatccggctaccggtaattacggggaagacacgatatcggaagatatgaagtctgcctcagtcatggataccggtacgaatacgatgatgcttgtctattccggaattaaggaaggcagccttaccattcacctgcagaatcattatgaccggccatttgacaggattcgcgtagggaataaaacatatggcgtagatttcagcaggaagcttcggacgaagcaggtatatgttgtgtcggaggtgatgtgatgggagtaaagctgattggttttgaaaagttagaggctaaactgactaagaacatggatatgtctgctgttaaaacagtagtaaagaaaaatggggctgaaatgcagaaaaaagctatgaaagaagctcctgtgctcacccatcatttacaaaagtcaattatgttggaaattacagatggcggcatgaccgcagaggttgaatcaacagcggaatatgcaggttatcaggaatatggaacaagattcatgaaaggaaagccacatatacgtccggcatttgaagaacagaaggaaaaattcaaggcagatatgaaggagcttgtgaggtgataagatggatccacagcaggaattgttcagcgccgttttgatggcattgaaagaaaaatataaggatacgggagttggtgtgtatgacacggatttaccgcctgaggacacgccgtatccttttgtttacctggcggattgctccgagagtgatcaggctacaaaaaacgagattatcggcgagactaatctgacgttgaaagtctggcacgataatatacggcagagaggaacggtatctggtatcttagcagatattaaaaacatctgcaggtctatcgaacatacagcgcactatgcctggaatatgcggagaccgacacagagaatcctgccagataatacaacgaaacagccgcttcttatgggaatcctagaagtggcatttaaatttagttaggagatgacaatagtgaagaacagaaagttatttggactgcagttatttgcagaagcagtagcaggcaaaaagatcgtatatctgtaccgtatcctgagtacagagaaagatcatgacgcaacagcacttgcgtttacgacagagaacgaacgtacaaaatcaaaagatgcagattctacggcaaccaaggatggtgcagtacgtacacctgggactgcagaaggagaaatcacggcatccagtttattgaaaaaaggagataaattcattgatgaacttgaagcagcacttgatgatgatgaaaagatggaaatctgggaagtaaatctggcagagccacaggcaagtttgagcaataagtttaaagcaaaatacttccagggatatcttacggaaattgataagacatccaatgcagaggataatgttgagttatcgttgacatttgggctggaaggaaaaggcgtagatggctatgcaacggttactgcagaacagcaggaagtagcagcatatgtatttgcagacactcagaagacaggagcttaagagaacgagaagattcgtcctcttttttgatgtgcgacatcgcacagaagggagataaaacaatatgatggaacttacaatcaacggaacagtatatcagtttaaattcgggatgggattcttaagagaagcaaataagcttaccgtagttccggttcagggaatgccgggaaccacaaaagaaataggagcaaggtatctgatcgctagtgttgtggttgaccaggaaccgaacgcgctggtagatctgttagatttggcaaataagggagagaatccaagagtaacaaaggcaatgttagattcttacattgattcggaagaggtagacattgatgaactcatggagaaaacaaaagattttttatcgaaagcaaatgctaccaagaaagcagtgaaagagatcttgaaagagtacgaggaacagatggcgaagaagaaggctcaggagctgtagaagaagacctatataaaaccgtagcaaggaattgctttcggtattttggcttcacgtcatttaaacaggtggatcagctgacattggcagaatatgaacttatgatggaggctttagagcttcggatgcttgacgagagtttacatgaacatcgtcaggcatttttgaattttgcggtaaaggcagaaaagaaagccggtaaaggcaagaccaaaccagtttacaagagattccggcagttctttgattttgataaagaactgagaaagatgaagaatcgaaggaaaccatccagatttgctggaataaccaaactgctggatagagaggagtgagaggatggcagagtcgtatagtgtaaaagcaatattatcagcgcaggacaaaaacttttcatccattatgaaatcatgccagggatatgcgaataatctgaaaaccactctcaccggtggtcttggatttggtgcaatggctgcaatcggtggaaaggcgatgtcgctggtgacaaattcagtcagtgatttgtcgaaagagacgatagaaacatcggattccatgtataagttgcaggcagctatgagattttccgggtattccgaagcggagatacaaagaatagccggagcaacaggtacattaaaaacatatgcggataaaacagtattctccctgcaggatgttatgagtacattcggcgcattttcggcaaatggaatcaaagacgcagataagttgacggaagcagtcggtaatgcagttgctgtatttggcggaggtgcaaaggaatattcctcggtagcacttgcattttcacaggcaatggcggcaggagctttacatgcgcaggattggaaccagatcattaatgccagtccgcagcttgctggaggcttgcggaaagagttgattaagctgaatccaacattagggaacgacttcaaaggagcaatggaaaagggtgcaattaccgcagacatgctcggacaggctatcaataacattggtatgaccgacatggcgaaagaagcagctacatccgtaaccacatttgaaggcgctatgagtaacttggaagcatctgcagtaagcggaatgatgaagctttatgatactttcgcaaagcctaaagtgattgatgcaatcaatgggatgaccggtaaggtggaggcgggatttgacaaattgtccgttggaattccaaaagcaatcgaacttatatctccatactggaacgtgctgaaaacagatgcaaaagaggtagggacagcctttggagaggcagctggtgcgattattgacgaagtacaggaacttaccggagcatttggaaaaaaggaaagtgtggataatttctctgaaagcatgggaacagcaacaggtgcattgactacatttgcggattttctaaaagatcatgataaagaagtggcaaaagcgattacactgttaccgaaattatatgttgcttttaaaggctttaaaatagtcagtgcagttgcccctggtgtcaaaacttttgtgggcgcaattgtaagcatgacaggaaaaggaatagcgacactggcaggtaagttatttggcgtagcagcgggtgaaaaagcggtaggcactgcaagtaaagaatcatcaggaactatcctagaatcagcaaaagcatttgtagcgatcggagcgggagtagcattgatagcggcaggattttcccttttggcatgttcagccgcgcaaatcgcacaagccgggccactggcagcaggagtattgattggcatgacggttgcagtggcaggcttaatggttgttgccaaaaatgtggcgcctgctatgacggccggagcaaccggattcattgcctttggtgcagctgtcctgatagcggcagcggggattgctatattatcactggcggctgttaatctggcgaatgcgggaccgcttgctataggctgtatggttggcatggttgcggcaattgccggacttgctcttggcgcagcagcactaggaccagcattgacagccggagcagtaggtctcgttgcctttggtgtagctatattactggtttcaaccggagcactgctggcaagtgttgggcttgccatagtagcaggtgtgcttccgaccattgtgcaatatggaattcagggagcggcttgcatcgcaaccctcggagcaggcatgatcgtatttggcgctggggctgcagtagccggagcgggatgcattgtccttggtgccggacttgtagtggtaggtgccggacttacggtggttggtgcagctgtcctgatagcggcagcgggtgtgttgcttctggcagcgggaacactggcccttggcgccggtcttacggtagctggggcaggacttctagtgatgggagctgcattccctgcagtatcatccggagctttagcaacggtaggagcactgacagccttaacagcattatcattaggtcttgcggccggaatgggagcatcggctgttgtagtggtagcatttggagttgcaatggcgggtggagcagttggcacccttgcaatggtggtagcattaaaatctgtcaattcaagtatgaaatcaatagccggtaatgccaaaagcgctcaaagctcgctcacgagtatgcgagccagtgtaaatgtggtaaattccggactggatgcgttgggaagtagagcaaagtcagcagttaatacattggtaagacaattttcaaacgcagaaggaaaagcaaggagctccgggaatgctgttggaaacaacttcaacaacggggttcgtagtggcatgagccgagcggtatctacggcaagaactatgtctgcatccacggtagtggcaatgcgatcagctggatctggttcatacagttgtggtgtatatataggggcaggtcttgcaaatggtatggcgagtcaggtcggacgtgtaagatctgtcgcagcgcagttggcagctgcagcagaggcggcaattagggcgaaggcgcagattcacagtccgtcaagggtgtctgacaaattaggtagttattttggcattggatgggttaatgcaatattaggaaaagttaaactcgcaagaaaagctgcagcacagctggttcaaataccagagctggcaacaataccggatattggcatgaatattcgaacaagtatcgatgatttgaatgatgattatgaatacaccagaaatgaaacttataccatttacatccctgtcgaagtagatggccggcaggtggcaaaggcaacggcgaaatacaccaaagaagaaattgaacagcagcagaaaagagatcttcgaaagaaaggcatgagataaggagggcagatatgtataaatttgtagacactacagagagacaggaagagcagatactgccctccgaagctctcaattttaacggagtctattttgaaaatgtaatccccggatatcggacactatatgtgtccggtcgggagatgatcgaaacagaaattacagatttggatacggagattatggatggatccagatatcgaagaaaacgatataagccgagaacgatcactgtcgggtatcagctgatcgctaagagtaatgcggaatttcggaatgcttacaacaaattgaattcactgttggatgtggcagaagcgaagctgatcttcctggatgaaccggataagtattatgtcggaacaaaggtaaatgccggcgatgtgccgcatggcagaaatgcggtaactgcagaaattgagttctattgctcagatccatttaaatattccgtagaagagtacgaggttgcgccaactgcagatgacgggacaacatttgttgttgattataaaggaacgtataaagcacatccaacgttcgaagcagtgatggaaaatggagagaatggatttgtcggattcgttgatcaggataaacatattttacagttcggaaacatcgaagaggaagatggggagacgtacaaagaaaatgagacattggctacgcttcaggactttttcaatgcaccggatgatacatctggaacggattttatgcatcctttctacggagcaaaaggatccctcggaacatcaacatggtttaataccaagttcctctctttgaagtctgcagggcaacaggttggccgcgcaaacggtggactcagaaccatcattcttccggcggactcaaccggtgatcaggaagggtgtcagaacttttattcttatttccatatcctgttttatgccggattgatgggacagaccggagaaatgtgtattaactatctgacagcggacgataagcttattgccggtgtgaactggtataaatcggatatgagcggaaatacaggacgttatgatctagtctgctacaatccgaacaagaagagtaccgatcagcaggcgggacgtgtgctgaaaacgtacacttatatgacaagtcatctgcggaagcaaaatccgtggtactggaactggggacattgtgatcttagaaaagaaggcagtaaacttacatttttctataatggcagttatccgagcttcaatattccggaaatagcggatatgaaatgtgccaagattcagattgcgattaagcagagaggaacaagatcagggaataagtatcttacatacaacgggatcaatgctttttattttcagaagttacatgtaaaaaaatggagagatgtaccgaataaatttgcgcaggactgcagtttgattgcaaattgttcagatggatcaattcggatgaatggtctgccaaagccggatctgggagctcttggaaatgactgggaaacattttgcttgaagccgggagttaatcaggttcagtgcttgtgctccagctgggcgaagaaaccgacgtttaaaatgaagtacagggaggtgttcttgtgatcatatattttgctgacagggcaatgaacattcttggatcagcatctaccggactgccgaagggactaatgattacaaatgataaaaagacagaagaaatatccgaaggtgtggcaatctttgaatgcaatttggattacaattttgcgaatccggatgaggacgaagaacaggaagttgatgtgaagaagcttgctgcagttggaaattttatcctaaaacagggtgcagacagcagtgaagctgaagtatatacaatcattgattcgacgattgatccgatcaaaaaagatgcatctatctatgcggaagatgcaggactggacctgttgaatgaggtagtcggagcgtatgctgcagataaagcttataacattgcctattacattaataaatttgcgtatgattccggatttgaaatcggaatcaatgaggtaagtaatcttacaagaaagttgtcctgggatggcgaagacacagcaacgaaaagactattgagtgtagccacacagtttgacaataccgagattggatttagtttcaaagtcgagaatatggctgtgaccggaaaatacataaatgtgtacaggaatagggggaatgattcgggtgttactttgactgttggcaaagaggttagcggatttcgaatcaagagttccatcgcagatcttgcaacagcataccgctgtactggcggaacaccggaaggatcagaaaatccgattacattaaatggttataagtacgatgatggagatttttatgtagaaggatcctatgtgaaatcccggaaagcactggaaaagtggagccggtatcagattaagacagaaaagaataagaatgatgttggacatatcgtaaaatcctttacatacaatacgacatcgaaatctgaattgtgcaatcgagccgtatccagtcttaagaagatctgtgatgaagctgttacctatgaggtagagttgttatatcttccagatggggtgaaggtaggtgacacggtatccattgttgatgatgacgataatatatatcttactgcaagactgttgaaattagagatgtcagaatcgaacgatacaaaagaagcagagctaggggattatgtaagacagggaagcggtattgatgcaaaagttatggagttggcagagcgatttgagaagatcgctaagaatcgtaatttttatacatggacagcctttgcagatgatgaaaatggaacgggaatttcggccaatgcttacggaaaagattatctcggaatcgctacgaaccggcttgcgaaagaagctgatctttccgatccgacgcagtacacatgggtaaagataaaaggtgagcagggcattccgggggtatctggcaaggatggagcagatggcaagacaccgtatttccatgtgaagtattcagcggtagcgaacccaacatcatacagcgatatgacagagacaccggatgaatacattggaacgtatgcagattatgagctagatgacagcacggatccgaaaaagtacacctggagcaaattcagaggagacaacggagaagatggtgcagatggaattccagggaaaaatggagagaacggcgagacgagttatgtgcattttgcttatgcgaccagtgcggatggaaaaactggattttcgacaacagatactgtcgggaaaacatatatgggacagtatgcagattttgaaaaagctgattctgaagatccgacaaagtatcggtggagtaaatttcaaggtccccagggcccacaaggtgaacaaggaccacaaggcttgcaggggttacaaggtgagaaaggtgaacagggtatccccggtccaacaggagagacaggtgccaccggagcaacaggtccccaaggaccggcaggcaaagatggaacgaacggaaagaccagttacttccatataaaatattcccctgtagagaatccaacctcatctcagatgtcagaaataccgaatacctatatcggaacctacgtggactatacagaacaggattcgacagatccaagcaaatatacctggtacagattccaaggcttacagggcgcacagggaacacagggaatcccaggaaccaatggtgcagatgggaaaacatcatacttgcacattaaatactccaatgatggcggtaagacattcacatcaaattctggagaaacagtcggggattacattggacagtgtacggactttaatcgggcggatcctactacggtgggagcttatacatggagtaagatcaaaggtgaaacaggagcgaaaggcgaaaaaggagataagggagccacaggagctacaggtcctcagggacctcagggagtgaaaggtgatactggtgcgaccggaccacaaggaccacaaggtgtaaaaggtaatacaggaccacaaggaccacaggggccacaagggcagacaggaacagctggtaaagatggacaaatgctctatgcgacatgcgatactgcagctggaaccgtagcgaaagttgcaagtttggcggctggttcactttcgttaaaagccggggcgaccgtagctgttaaatttacttacgcaaacactgtatccagcccaacgcttaacattgccggtacaggtgcaaaagcaatgtatatccaaggtgtccgggatgtatattggaccgacggagcaaccgtaaccttcacatatgacggtataaactggagagtggcatccgaaccagtatatgcgccaacagctacgatcggtaatgctgctggattcaatgtgtttatagatggaaccagtgtacaagttaggaaggggactgaagaacttgcatccttcaaaggtgacgagattcgattgggagagggtgtcgattgtgcaaaagtatttataggtgatctggaaataggtgtagatggagcagaaacatatcttagaaatttatctacgagaatttcaacgaaggcatctcatgagggcggatcagcatcagtaccatccgtagtagttaatgatacagatacgtatgtgaacggcgagagtatgaccgctttatttacaaaggtaagtaacaaggcaaataaagcttggacacgattaaaaaaccaggcaactgtaggcaactccacaatcaccgtagacgtatcgcaatattccgagttcctgataacctgtggcttggcaagtagtacgaacggaaactattatagagaacttggaagcacaattgtaccagcaagtgtattaacgagtcattccggcatcgatcacggatccggaacacatcaggcattttactccagtacatacaacggcggtatatcttatcttggtagcaacaagatcaagatatacaacaacggaggtatcacaagattatacgcaagataatcggttgaaaatgaatctttcttggaaaacttctccttctgctgtataatagcagtggagggagagggtgaaatggatagtaaaaataaagaattttataagaaaataggtgcatatatttggagctttataaaaggaaaagtttggtattcatttttacttttaattagttctctttatatatggaaatatcgctttgaaattaatcagcttaaagagttggatgtaaaaaatttgatatttattttgtggatttttttattagcctttcctcttttttcggagatggaaatactcggtgtaaaagtaaaaaaggaagttaaaaaggcaacggaagaagttaaaggatcattgaaggatattcaatcacaaattacgcaattacaattaaataattctgtgtcgaataggattagtatagagaacactcctttgccttcggaaaaaagactcgaagaaatgcaaaaaagtgtttctgatttacatcaaaatatttcagaatcaaatgccgatgggtcaacagagaaaagtgtatttctttttaaaacaaggctaaaaatagaagtagccttacgtgaaatatatgaaaagataggaaacgaaggatattacaaccgagtaataggactcggagaaatggcaaagctactaaatcaagaaaagataataagtgaaacacttttgggattgattatagaagtcagtaaaataaccaatcgaggggtacatggagagattgtaagtgatgaatatatagaatttgtaaaaagtgtatgccctggaataattcaacagcttgatgaaatatcaaaaaaaatttaaataagggtagggattcctactcttatttttgtaggagtaaatatggaaattagagcaagaccgtaaggtcttatttttatacgcaaaattaaagaatcgaggtacatagagtgtatgtagacgtaaacacaatcattactgttggaagcttattaacggccgtagtggttatcttttccgctgttttcgcagtatacaagtggtatttaagacagaatgagcaggataaagagatagagagaatgaaatcagaacaatgtttgcttacttatggaattctggcttgtctgaaaggtttgaaagaacagggatgtaatggacctgttacagaagcaatagacaagattcagaagcatataaataagcaagcgcatgatcaggaggattaagcatggatattagtacaataggaacagtagtagggatcgtagcaatctgttatgtaattggacttggctgcaaggcatataagaaaattccagacaaatggattccggtcatcatggctgtatgtggtggagttctgggcgttgccggactctacacaatgccggactttccagccggtgatgtgatcaatgcagttgcggtcggaatggccagcggattagcggcgacaggagtaaatcagttgtataagcagcagtgtaagtagagggcgaataatcgtcctctaacatattatatagtgtgtgcgacgtcgcacagaaaggagcaattatggcacatttatttattatagctggacacggggctggtgacagtggagctgttggatacggttacaccgaggcagagagagtccgtgcacttgcaagacgaatcgtagcatacggaggaagtaatgttactcttggagatacaaaccggaactggtatgctgacaaaggcattagctcactcaaaatctcaaaggattggcagatcttggaacttcatatggacagcggagtatcgacagccaaaggtggtcacgtgatcatcaaagaaggatataatccggatcagtatgatacagcacttgctaacttcatcgggtcattcttcccgggcagagccaataaagttgtaggcagagcacaccttgcaaatgtcaatcgtgcagctacaaaaggttacagctatagacttctggaaaatggattcattacaaaccagggagatctcaacaagttcaacagccagattgatgaactggcaagagggatcctaaaagcattcggaatctcgtctgcagcaccagtagcatcagccaagaagacagaacctgtcgatggagagatcaagtccggtggagtattccagagcaagacggataagttcggtacaatttcataccaggcacacatgagaagtgctggctggggagcttggcagtctgacggattaatggtcggctcaacaaaccagaatcgccggatcgaagcactgcacatccagccggtcggagaaacagatgttgttgtccatatgaaagggatcggaaacaaagaatacaagaacatcgccaaagacactttgatcggaaccaccggacagaacagaagactggaagcgatccgggtcaccggaaaggaatctttctatctgtacagagtccaccagaagagtattggctggtcagaatgggccaacaacggagagtgggctggtacgaccggaaaaggactgcagatggaagcactggagattaagaaatccatgttctccgtcgaaccgcatgtacagagcaaaggatggctgtcaccaaaagccgcagagaatgtgatcggtatcactggtcatgcattacgcctggaagcaatccggatcaatccatacggaaagaccattaaggcaaaggctcatatccagagcaaaggatgggtggattacggcatgattaccaaagatacgattatcggaaccgtaggcgaaaagaaacgtattgaatgcttatgcttcgaaggagactttgaatatcgtgttcatatccagggttccggatggacagactggacaagagccgatggagtagctactctcggaactgtaggtcaggaacttagaattgaggctattcaatttagatgatttttgctaaaatgtagcatataaataggtaaaaatccactttataggttatagcaaaaaggtcatccaattcggacattgtacctgccgtccgtcacaatactgcgtcagtatcggctgcttgacattcggtctggaaagataatcggcaaacaattcatccactatcacagagatcgtatcatagatattccgttccggaatccatttgtgatcaaatgcggttgaagaagtgatcgtaaaatcatatccgcggttccggtaaaattctgtatatacccggttcagagtaaaagacatgattgccagtacgtttgcccggatggtatcctccggccaggtcgcgtagatttcactggaagctacatttttgatataatccttatacttcacataatagtttttggcagtggagtcgcgtggacttccatcatgaactacgatgtattccgggaccacgacgcggcttaagacaatctctccggattcgaaggtcggctggatctcgtcttcgggaatcttaggcggataggtggcatataatgtatgagccggaatgacgaatacggtttcctcgttttcgggattgtcgattggtttcatgctgacattctgaatggcagtgacatcggcgagaatttcagcaccggcaatactgaccgactcgaagccttcggcggtgatctgcatggtatattcggaatatggctggacttcattttctggattcaggctgtattctaacggtggtgccgcaagatcaatcgtatcggtctgcccggaactgtcggtagtaagttgttctaactgagcttctggaacacccgtgtagtagatggaaatctgagccccctgaatcggataggcagagatgtcagatacgagattaatctgcagacggcctttgtcgggagtatcctgagtggttggagtcgttccgttcataaaataggacctcttttaagactctgttactgacagagtatgcaaaaataagaaaaatgtgaagatacagggaataaaagagatagattgttacacaaagtatggaacatcttaaaaataacagaaacaggagcgtagaacagagcatgaaaagaaggtgtttacggatatatagaaaaagaagaaaaaagaaattaatcatcctgattctgacatgcattctctttcttggaaccgcagcagcagaaaggggcggatacctggaacttgaacaatttggttcaaataaaaaacaagatattccttatcagaaagtatccataacggaagaagagaacacggagaaatattattatcagcagttgccgactgaacaaaggcaggtctatcaggaaattctggaaggtgtcagaaaccacacggaggaaatttatgtacataacgcggatgtagatgagacaaatcagatttttcagaagctgatgaaggatcagccggacatcttctggtgtgacgggacagcaacggctacgactcataaaggaacagaaagttataccgtcctgaaaccgaaatatttttacacagcagaagaaagccagaagatgcagaccgcgattatgcaggcggcagagaagtggctggcagatctggatgccgatgcagatgactatcacaaaattctctatgtatatggaaaaatcgtagatgaagtagagtatgatgagagcgcgccggataatcagaatatctacagcgtatttgtcaatcagaaatctgtatgtgctggatattcgaaagcaacgcagtatttgttggaacggcttggcgtgttctgtacttatgtgacgggaaagacgacggaaggcggaaaccatgcgtggaatctggtgaaatgtaacggcgattattattatgtcgacacaacctggggagatccggtgttccaacaggaagaaggagaaaatacatcccaggatgcagaacaaaattcaggtcaagatgcagaggcttctggtaataaggcaaatatcagctatgattatctgtgttgtgatgatacgcagttatttcagacacatattctggataaggatacacagatgccagagtgcagcaagatggattgcaattattacgtggtaaacggaatgtattacacacagtatgatgccaagaaggtactggaagccatgaaccaggctatctgggcgaagaaaagtgctacaatttttaaattcgcagatacattcgtctacagtcaggcgcacgatgacattttccagaaagaacttgcaaaagcagtgcagaatctggcggattactatggagtatcgcaggtgaagtaccagtacatcgatgacccgagattacacaagattgtaatattttggcagtattcataaaaaaacaaaaatatccgttgaaaatcctcggattatgtagtataatttttacaatttgtgaagacataaattgtctggtaccgatggatgaaaaacgaggcggttttgtgcttgcacaaactgccttttattctgtatttttaagaaaaattctttgtaacaacgaattttttttgcccaaatatagaaaatgtacctgaagtacagcagtatggattcatgaaaaaagaaaaagaaacacagaagggaaaaggtgaatatatgaaagcatttcttatattagaagacgggactgtctttaccggaaccagtatcggttcgacaaaagacatgattagcgagatagtgtttaatacttcaatgacaggttatctggaggtattaaccgacccttcttatgcgggacaggccgtagtaatgacctatccattgattggaaattatggcatcacaccggatatggagtcaaggaaggcatggccggatggatatatcgtaagagaactttccagaatgccaagcaacttccgttgtgaaggaacacttcaggatttcctgaaagaacaggatattccaggaattgcaggaattgatacacgtgcccttacgaagattcttcgtgaaaagggaaccatgaacggaatgatcaccacgaacgagaattacaacttagatgagattctcccaaaactgaaggcatatacagttggtgatgtggtatcaaaagtaacatgtgatgaaaaatatgtcttagaaggcaatggaccgaaggttgctcttatggacttcggtgcaaagaagaacattgccaagtctttaaatgaacgcggctgtgaagttacagtttatccggcaggaacaaaagcagaagaaatcattgctgctaatccggacggcattatgttgtctaacgggcctggagatccggaaacatgcgtatctattatcgaagagatcaagaagttatacaatactgatattcctatttttgcaatttgtctcggacatcagcttatggcacttgcaaatggtgcaaagacttataagttgaaatatggacaccgcggcggtaatcatccggtgaaggatctgacaaataacagagtatacatttcttcacagaaccatggttatgcagttgatggtacaaccattgatccggctatcgcaaaagaagcatttatcaatgtaaatgacggaaccaacgaaggacttgcatacgaaggaaagaatattttcacagttcagttccacccggaggcttgtcctggaccacaggattccggatacctgtttgatagatttatggatatgatgaaaggagcaaaataatgcctagaattaaagatattaagaaagtattagtaattggctctggccctattatcattggacaggcagcggagtttgactatgcaggtacacaggcctgccgttcattaaaagaagaaggtctggaagtagtccttttgaactctaacccggctacgatcatgacagataaagatatcgcagaccgcgtatacatcgagcctctgacagttgaggtggtagaacagctgatcttaaaggaaaaaccagacagtgtccttcctacactgggtggacaggcagcactgaatctggctatggagctggatgagaatggattccttgaaagaaacaacgtacgtctgatcggtactacttctgagacgatcaaaaaggccgaagaccgtctggaattcaagatgacaatggaaaaaatcggcgaaccttgtgcagcttctaaagtcgtaaaggatgtacaggctggtatcgaatttgctgaaagtatcggatatccggttgtacttcgtccggcttacacacttggtggaagcggcggcggaatcgcggataacagaacagaactcgtagagatcctggaaaacggacttcgtctttcacgtgttggggaagttctggtagaacgttgcatcgcaggatggaaagagatcgagtacgaagtaatgcgtgacagcaatggtaactgcattaccgtatgtaatatggaaaacctggaccctgtaggtgtacataccggagacagtatcgtagtagcaccttctcagacactgagcgataaagagtaccagatgctccgtacatctgctcttaatattatcagtgagttaaatatcactggtggatgtaacgtacagtatgcgctgaatccagattcatttgagtactgtgtaatcgaggttaaccctcgtgtaagccgttcttctgcacttgcatctaaggcaacaggatatccgattgccaaggttgcagcaaagatcgctcttggatatacactggacgagatcaagaacgcagtaacaaagaagacatacgcaagtttcgagcctatgcttgactactgtgttgtaaagatcccgagacttccatttgataagttcatcagcgcaaaacgtacactgacaacacagatgaaagcgaccggagaagttatgagtatctgtgataacttcgagggagcacttatgaaagccatccgttctctggaacagcatgtagacagccttatgtcttatgacttctcttatttaaaaggagaagaactgttagaagaactgaaagttgtagatgaccgtcgtatctggaagatcgcagaagcaattcgtcagggcatcagctacgaagacattcacagaattacaaagattgacaactggttcattgacaagatcgcaattctcgtagagatggaacagaaattaaagacagaagaattaacagcagagacattaaaagaagcaaaacgcttagagttcccggataatgtgatcgcagaactgacaggaaagacagagcgtgagatccatgaccttcgtcatgataatggcatcacagcttcttataagatggttgatacctgtgcggctgagttcgcagcagagacaccatattactactctgtattcggaagtgagaatgaagtagttgaaacttccggcaagaagaaagtactggtacttggttccggaccgatccgtatcggacagggtatcgagttcgacttctgttctgtacattgtacatgggcgtttgccaaagaaggatacgagacgattattgtaaataacaaccctgagacagtaagtacagacttcgatatcgctgacaagctgtatttcgagcctctgacaccggaagatgtagaaagtatcgtagatctggaaaaaccggacggagcagttgtacagttcggtggacagacagcgatcaagctgacagaatctcttatgaagatgggcgttccgatccttggaacatctgctgaaaatgtagatgcagccgaagaccgtgagctgtttgatgagattcttgagcagtgcgagatcccaagaccgacaggtggaactgtatttacagcagaagaagcgaagaaagttgcaaacagactgggttatccggtactggtaagaccttcttacgtacttggcggacagggaatgcagattgcgatcaatgatcacgatattgatgagttcatcggaatcatcaaccgtatcgcacaggatcatccaatcctggttgataaatatttacagggtaaagagattgaggtagatgccgtatgcgacggtgaagatatcctgattccaggtatcatggagcatatcgagcgtgccggaatccattccggagacagtatctctgtatatcctgcacagagcatctctcagaagacaaaagagacgattgccgaatatacaagaagacttgcaaaatccttacatgtaatcggactgattaacatccagttcatcgtatgtggagaagatgtatatgtaatcgaagttaaccctcgttccagccgtactgttccatacatcagtaaggtaacaggtattccaatcgtaccacttgcaacaaaagtgatcatcggacacaagatcaaagaacttggttatacacctggattacagccggaagcagattattttgcaatcaagatgccggtattctcatttgagaagatccgcggtgctgatatcagccttggacctgagatgaagtctaccggagagtgtctgggaattgccaagacatttgatgaggctctttataaagcattcatcggtgccggagtcaaacttccaaaacacaagaacatgattatgacagttcgtgatgaagataaggaagaagcagtagagatcggacgcagattcgagaagatcggttacaagatctttgctacagaaggaactgccaaggtcctgacagatgcaggcgtgaaagcgatgacagtcaataagattgagcaggaatctccgaaccttatggatctgatcctcggacataagatcgacctggttatcgacacacctccgcagggagctgatcactcaagagacggattcgtgatccgtagaaatgcgatcgagacaggtgtcaatgtactgacagcgatcgatacagcaaaagctctgatcaccagtcttgagaatacagatatccagaaactgacactgatcgacattgctaagatcaaatagagtttggacaatcggattttgcgtaaatgaattttatgtaacagaatttgaataattaatatttgtaatgtttgtaaaaacataaataaaaagtggcatacagcatgattattttgcagtatgctgcttttttgttgcctacctgtaaagaccagtggactggcattcatgaacagtctggagcaagaagtacttgcaagaaattttgtgaaaatcggcagtggatattactggacaccgtatattatcatgattgcggcagtaatttgtatcccggtatttttaattgtaacagtagtaagctattgtaaaagagaagcttaaggagcagagaaataacggagaaaaatgaacgctaaaaataagaaaaaagagtagcataatctgcggactttaaaaaagtaaataaaaaagttgacaaaacgagacatacatgatatgataccaatcgttgcttgtaacaaatttgtaatatttgtaataaagttgcaaaaaatgaatatactttattaaaagaaatgtaaatcattgcaacaaaatcaggagggtatttatattatgttaaaagcgaagagactgaaatcgatgttcgtgctgtattcagcatgcgcagtaatggcaactggttttaccagtcaggcagcctctgaacagccggaagtaacaacaatcacagaaacaaaaggggaaaatacgaatacacacactgctgtacaggcgatatcacagaatatcgtggcatctgcacaggaaatgacggatgcaagccagcaggtaattgcagacaatatagcgaaaaaagaagaggaagaacgcctcgcaagagaaaaggcagagcaggaagcaaaagaaaaagcagaacgcgaagcaagagaagcatacgtaagagccaatcaggaactgcttgcatccatcatctactgcgaagcaggaaaccagccgtatgaaggacaggttgccgtcggtgcggtgatcatgaaccgtgtaaagagtggaagttatccgaattccatcgaagaagtcatctatcagtccgggcagttcggaccggcagcgaccggatggctgaacagagtgagaagttcaaagggatattcacagacagctctgcaggctgctgtagatgcgttgaatggctcgaatccgattggaaactgtctgtattttgatcaaggcggtgccggaatgaagatcggggcacattatttccactaacatttgtagaaataatatagaaagaaatgcataaggaatggagccggagttcttcagaaattcgaaagaaatcttaagaaagccggaattgacaattgcatgacaaatgtattacgataagagggcaaaagtgttaaacttttgtcctttttgtcaccgcgcattagaaaagatgacgatggtaacttacgcagataaggacagagtttgaagtatggggagaagaaagattgtataagattttaatcgtggaagatgatgaaacaatagcaggcggactgaaaaaccatttggaaaaatggaattatcaggcagaatgtatgacggattttaaagacgtaatgggaaaattcgtggaatttgagccgcagcttgtgttattggacattgtgcttccattttttaatggatttcactggtgtcaggagatccggaagatctcgaaggtgccgatcattttcctgtcatcggcgaatgataatatgaatattgtgatggcaatgaatatgggcggcgatgaattcatcgagaaaccgtttgacctgaatgtggtgacggcaaaggtgcaggccgtgttaagaagaacctatgaatttcgtggaacggcagatgtcatggagtggaacggtgcgatcctgaatctggcagatgcgacagttctgtatcaggaccagaaactggaactgagcaagaacgaattcaagattctgcagatacttctggaaaatacagggaagatcgtaagccgtgaaagtattatgacgagactctgggacagcaatgaatttattgatgacaatacactgacggtcaatgtggcaagacttcgtaaaaaaatggaacagattggccttggcggaaagatcatcacaaaaaaaggaataggatatatggtggaggcatgaaactgttaatagcattttttaaagataaaacaagagagatcagcctttatgccggaacggtcggaatatttattgttgtagcatttctttataatatcaggatggatgcgttgaaatatgcactgctgctggtgatattgtggctgctcctttatgtaataacggaatatcatcgcttccggaagaagcatcttctgctggaacggtttaagaagagcacgcaggagtgcacaaaagaacttccagagtgcaggaatcttctggaactggattatcaggaattactggggatctttgacgaaaagattctggagttgaaatcagaggcaagaatcaaaggccaggacttaagtgattattatggtatgtgggtgcatcagatcaagacacctatcgctgcgatgcacatattgctgcaatcggtggaagatgaaaacccggcactgccggaattaaaagagatgaagatggaactttttaaaatggaacagtatgtggagatggtgctgacgtatctccgcatggaagatatgtctggggatctgcagtttgagaaggtgtctttagataagattctgaaacaatctgtccggaaatattctcagatgtttattcttcagaagatccgtctggattaccggccggtggaacgaatagttcttacagatgaaaaatggctggagtttgtgacagaacagattctgtctaatgctttgaaatacacaaagaatggcggcgagattagaatctgtctggaagaaaaaagaggacgggagtgtctggtgatcgaggataatggaatcggtattcaggcagaagatcttcctagagtatttgaaaaagggtttaccggatataatggaagagcagataagaagtctaccgggattggactgtatctttgcaaaaagatcatggataagatgggacataagatatggattgattcagaggtgggaaaaggaacccgtgtatatctggaattgacaaggaaagaatggaatccggaataacgatcagataaaaagagaaaaccttacaggaatgtaagattaaacaggggaaatgtcacatgcttcgatggcaggatatttcctctttttttataatagataccgtaaagaagaaatcttaaaaagaaaggaagaaaaacttatgtcattactggaagtaaaaaatgtgaagaagatatatacgactcgttttgggagcaatcaggtagaggctttaagagatgtgaattttacggtagaacgcggggaatatgttgcaatcatgggagagtctggatcgggaaagacgactttgctgaatattctggcggcacttgataaaccgacagaaggaaaggtttatttaaaagacagggatctgggaaaattaaaagaaaaagagatcgcaacgttcagacgtcagaatctcggctttgtatttcaggattttaacctgttagatacattttcattaaaggataatatattcctgccactggtattatccggaaagaaatatccggagatggaaaagagattaaaaccgattgcagaaaaacttggaattgaaaaactactggagaaatatccatatgaggtgtccggtgggcagaaacaaagagctgcaattgcaagagcgctgatcacgaaaccacagctgattcttgccgatgaaccttcgggagcactggattcgaaagcggcagacagtctgatgaatctttttacaacgattaaccaggaaggtcagacgattgttatggtgacacatagtgtgaaagcggcgagtagtgcgaaaagggtgctttttatcaaggacggaaaagtattccatcagctttacagggggaatcttacgaacgaagaaatgtatgaaagaatttcagatacgctgaagattcttaccacaggaggtgaggaggatgaataatttcatctatgaaaaacttgctgtgaccaatcttaagaataaccgtaagacctatgtaccctatatctttacaggtgttctgaccgtcatgatgttctatatcattgacgcactgagcaagggggaaggtattacccagaatacattgaagatatgtcttcagtatgcaacgggtgtgatcattgtatttgcagtgatttttctgttctatacgaatagtttcctgatcaaacgacgaaagaaagagatcggagtatacaatattcttggaatgggaaagcggcatattgcacgaatgatggcagttgagacgatcctgacggcgggaatcagtattcttggcggtctggtgtttggaataatatttgggaaactgatgtatctgctgctccttaagattctgcacaatagcgtagatatgcagttttcggttaatgggactgcaattgtacagactgtcatattatttgcaggaatttttcttctgacgtatttatataacattttacagatacagctggtgaatccggtggaacttctgcacggaggcaatcagggggagaaagagccgaagagcagatggctgcttgtgatcgtcggtgtggcggcacttggcaatggttactggattgcacttacaacagaggcaccgttagaagcacttttgaaattctttgttgcagtggtctgtgtgattattggaacttatgcactttttattgccggaagcattgtggtattgaaaatactccggaaaaataaagcttattattataatccaaagcattttaccagtgtatcaggcatgatctatcgtatgaaacaaaacggagcgggacttgcgaacatctgtgtgttaagtacgatggtgctggttatggtatccacaacggtatctttgtatgcgggaatggaagatattctggactcacgttttccgagagatgtttcaattgtctgcaatgaagccgatacaaataatgaagagactcttcagagactgataaaagaacaatgtgagaaagcaggggtaaaaataacagacagagtccggtacagatatggcagtatgaatgcggttttgaaaggaaataatctggaaaaggtagagcagtactatccggacaatcatttttactatgtagagatgatcacacaggaagagtataaccggatagaaaaacagaatgtttcgttaaaggaacaggagatactgacctataccacgaacggcaaatgtggaaaaaaacagataaacattgcaggacagaactatcaggtgaaaaaagaactgtccgagatgacgagccagccgaagagcacggcagaaatgtataagacattatacattgtatttgcaaatgcagagcagattgaacgtatcgagtcattttcttatgcagataaattcaacctgaagggagatgacggaaaacaaaaagagacactggaacagatacagaacgaattttatgaaaagtttccggatggaacgatggaaagccgtatgttaagccgttcttctttttatgaattgtacggcggactgttctttattggaatctatctgggaagtatgtttattatggcaacggtactgatcatttattataagcagatatcggaaggctatgatgacagggagcgttaccagatcatgcagaaggttggcatgagtaaaaaagaagtgaagcgttccatcagaagccaggtcttaagcgtattcttcctgccgttggttgtagcagcgatccatgttgcagtagcctttaaagtaatgacaaaaattctgggagtattaaatcttacgaatgtatcgttgtttgcggtatgcacaatcattacgatagcggtgtttgcggtattctatatcatcgtttacagtataactgcgaaagaatattaccggatcgtgaattaagattaagggtttaccattgactttgtatctttcaggttgtattgttgttttagaatgttttacgaatcaaggaggaacttaaaaatgacaagagaaggcgaaagagaactggtaaaagtggaacatgtaaatggcggagacggttatattgtaagagaagcaatggttacttcggaagaagttggagaagcatgtaagatgtatgccaagattcatctggatccgggatgtgaagtaggataccattatcatcatggtgagacggagtcttacttcattctgaccggacacggaacttatgacgataacggcgaaaaacagccggcaaatcctggcgatctgttcctgtgtaaagacggagatgcacatggaattaagaacaccggtgatgaagaacttacctttatggcattgatcttaaaaaaataatattggaaaatatgaaaaacacctgtctgtaacttggatcatttcaggaatgataccgggccgcagacaggtgtttgtattgccatgcattcggaagaagcggccggtggcaggttctctgcattgattataatgaacggaatacatccagcagccggtcattatcctctggattcataatgcagaaccgtacatattctccgttcaggctttcgaaagaagaacagtcccggatcatgagattctggtgaatcgctttttcaaagacatcgaaagaagtgagtccttcttttaagatctttacaagaacaaagttggcataagctgggtaaatctttacggtatccagtccggaaagctctgtgcacattctggtgcgctcagaatcaatgagagaccaggttttctgaatataatcggtatctttcaacatccgttcaccggcgtaagccccgatactgttcaggctccacggattctggtgggtaagaagtgtctgaagaaatgcctgattactggtgagaccataaccaaagcgaagtccaggtgcggcgaagaacttggatacaccgcggatgaccatgaagttgtcgaattccggtacaagagaaactgcagagagggaagtgccttccggagcgaattcgatataagtctcatcgatcataacgaagataccaagtgaccggcatacggttaacagctttttcatatcagcggtactgatggctgaagaggtcgggttgttcggattacagatgatcagaagatcaatatcacttttcagtgtatcggtcagatcggaaatatccagtctgaaatcctgttcttctttcagattataatattccagtgtgccgccgaccagattcagctctcttgcatattcggaataggtcggtcccagaagcagcgctctttttggtgcgcgctggctgatcagaagtgagataagctccgtagaaccatttccgacaacaatatgttccggcgaggtattggtatatgcagcaattgcttttttcagatctgtataatctctgtctggataactgctgatgatatccagatgttctgcgagatctttttttacctgtccggataatccgagcgggtttacattggcgccgaacaaaacaatcttttccttatcaaggtgataataatctgcgatcttttccagatcgcttccgtgaaattctggtttttttttcataattttccatcctatcgacacaattttgatattttctctttccggcattgccattcgttgacaaacaatgctataatttattatagtatgttttaagaaaaaagcaacgaaagaagcaggtgtaggacttgaaaaataaaatccaaaaattttcaaaaggcgactttcagttgatacgacctgatgttatattcgatgagacgaatctggtgctcattataggtgaaggggaagtatacaggggaagttttacaatgagggcgaataatgaaggcagaatacgaggactcgtttactcgtcttcttttcgtgttcattttaaggaccagggattcgagggaaatccgtcgagggttgagtttacatatgacggacgtgggcttcgtccgggacatgtagaagaaggtaaatttacgatcgtatgcatagttaagcgtcaaaattatgcgttgggttttcgaaatttgcctgtttgagccgaatggcgagttgcaaatttcggaagctcgtttttagcataattttgacgctttagtatttcccgccgacggaacctgaacaggaacggcttcctactttttatgcaggtccgggtaatcatgccttttgccgatttgcttgcccagagtgcctctgtaaccttctcatcctgatccatataaggttctgtctccatacgaagtgccgcaagtctgttctgtacaaatctcgtctccagctgcagatgtacatagatataaaataccgttcctataaccggaagtgccatcacacacagcatccaggtcattttaaatgccgggttcccttctgtattaatgatatatacaagaacaacgatttccatcacgctcatcgcactgtatataaaggttgcatactctttcagatagtatggaattcctaagaataccagtaactgtatcagaatcaatatgacaaaaatcccggcacggctgaacaccattttaaaaaatttcttctttgccaccgtctttttgctttgttctttcatactttttctctcctttatccaggaccatacaattctcaccgggtttttccgtcccaggctcccttcaggtactgatacagccaggatatgatacagtgtatcatatttttattttcttctcaacttgcaataatttattttaatttaatggaaaaaagcatataatatgtgctatgataagggaaagaacggaaaggagtcagattatcatggcaaaatggagcaaaaaattattaggtcttgcagcaatcggcagtgccgcagcaggtctggtttattatttaaagaagtcaaagaaagatgaggacgatgatttcaacgatgattttgaagacgaagacttcgatctggataatgacctccaaccggttgaccgtggatatgtcgatctgaatgcagccaaaacaactaccgaagaggacaatgcagcagacgacagtacagaagatacctctgcggacaacacagaagatacttccgaagatgctgatgctaaggacactccggatacttccgaagacactgacgaagacgacggggatgacgaggattaatcggtatttattacctttactgcagaagacatttctgtatccaatagtctttttgcatacacaagtataaaagagcagtatatgatatcaacagggtaatctttttattctccccgtttgatattatataccgctcttttttctttctaaaatgttggaaacactttctattttctccagcattgattcagaattgccacagcttctttgatatcttcttctctcatattcgcatatcccagaaggatggttgctttttccttttcttctttgcgaatccggtaatcagaaagcccatatacccggatatctgcttttttcgccttctcgatcagatttctttctttttgtccgtttttaaatgttaacaggatatgaacccctgcatgttcccccgatatctcacagatatctcccagtggtttcaaagcttcgatcaacacatcatgcctgtttttatataacgccctggtcttattcagatggcgttcataatatccttcttcaataaagtgctgcacgatcgtctgatccacttttgataccgtagaattcacaaagcttcccttcttccgatatgctttcagaatatcttttggcaataccatataactcagacgtattgcgggtgcgatggatttggagaatgttccaaggtaaatgactttatcttccgcatcatatccctgtaatgccggaatcggtttccctttatagcggaattcactgtcataatcatcctctataatatatcttccgtctttttcatatgcccatttcaaaagctccattcttcttcctatcggcataacaatcccggtcggatactgatgggatggcgttacataagcaatatcagctcccgtactttcaagatcctgtattttcataccatgtctgtccatcgccacaggaaccgtctcatacccaagtgtatggatcactctgtatgcctgtttataagtcggatcttcaaatgcgatcatatgttctgttccgaggatcataccaagcaacatcagaatataatcactccccgcgccgatcagaacctgatccggtgtacagtccactccccgcgcctgatacagataattactgatagcactccggaaaccatattcgccctgcggatcccctgtacggaataattctgtcctgtcatccatcaggatatcttttgacagttttcgccacacattatacggaaagctgttcagatcaactccattcggcgtgaaatcatattgatacacttttttcttttctattttccgttcggacttcttttcttcttttttcagttgatataattcatcaatctgagccacgaaaaaaccgcggtatggggcagattcaatatatccttctgataataattgttcatatgccagttcaaccgtgctgcggctgacttccagatgctttgccaaagccctggtagacgggagtttttccccgtaaggaatcctcccgttctggatatcagacttgatataatcataaatctgctcatacagcggcttcttcgaacgactgtctagatttatcgttaattcattcattttatttttccatcttaatcacagtatctttattaatgtattctactgttcattatttcttattttttaggcagcttaaatgaactcttcagcgatacgatacggttaaataccagattctccggtgtagaatctttcgaatcgatacagaaatatccgtttcttacaaactgaaagctgtcgcacggacctgcttcgttaaagctgtcttctacatagcactcctttaaaatctgcagtgaattcggattcagattcagggaaccgtcttctttattatatacacccttctcttcatcgatcagattctcatataatcttacttctgctttctttgcctgtggagcacttacccagtggattgttcccttcactttacgtccggtaaatcctgttccacattttgtctccggatcataagtacagtgaacaaccgttacatttccttcggcatccgtctcgtaacttacacattttacaaaatatgcatgcatcagacgtacttcattgccagggaaaagacggaaatacttcttcggcggctcgatcataaaatcattacgctcaatataaagctcacgaccaaatggtacttttctcataccaagttccggattctccaggttattctctacatccagatactcaacttcttcctccggatagttatcaattaccagtttgatcggatcaagaactgccatcatacgaggcttcttcatcttcagatcctcacggatacagtactcaagcattgcatagtctacagagctctggctcttggatactccacacatctcaacaaacatcttgatagattccggtgtgaatcctcttcttctgagggctgctattgataccagtcgcggatcatcccatccgtctacgataccatccataaccagtttcttaatgtatctcttacctgtaacgacatttgtcagatacagctttgaaaattcaatctgtctcggtgccggatcaaattcacattctttcacaacccagtcatataatggtctgtggtcttcaaattccagcgtacagatagaatgtgtgatatgttcgatcgcatcttcgattggatgagcaaaatcatacattggatagatgcaccatttatctccggtgttatggtgtgtcatatgagccacacggtagatgatcggatcacgcatgttaatattcggcgatgccatatcgatctttgcacgtaagactttctctccgtcctgatacttgccgtctttcatctcttcgaaaagtcttaagttttcttctaccgaacggtcacggtacggactgttctttccaggctctgtcagcgttccacggtattcacgcatctcttctgccgtcagatcacagacaaatgcttttcccttcttaatcagttttacggcacactcatacatctgatcaaaatagttagatgcaaaatagagatgatctccccagtcagcgcctaaccattttacatcttctttaatagactctacgaattccatatcttctttcatcggattcgtatcgtcaaatctcagatgaaatgttccattatacttctttgcaagtcctgagttcaaaagaatagactttgcatgtccgatatgcagatatccgtttggttccggtgggaatcttgtacatacttcactgtacactccttctgcaagatctttatctatttcctgttcaataaaatttttggaaactgttgtttcttctcccatggtatcctccttaggttttaactatacattatgctcattatcttatcataaaaaatatgatgaaacaagggaagatactttattttatcccaattacctttagcgcaaatgtacggattttagaacagacggattttgcccggccttacagatccatccattttcctttccatacatacaaaagcatcagtagcattcccagaagccaagacgtcggataacacatcatcacatgtccgagacttcttgtccatgccattgttcccgcgatccacatcacacggaatccacacaaagataccagaaatacgaccattgcctgcatcgtcttgcctgttcctcgtatcgttcctcccagcacatgcagaattccaagcatccagtaaaacggacagaaatacctcataatatatacaccatactccacaaccttctggttcgtcgtaaagacacctatcacctgtggagcaaatatcagcaacataatcccggttaacaccgaatagccagcccccatcacagtagatatatacattccttttctgactctgtccggctttctggcgccaatattctgtcccgcaaatgtagttgcggccatactgatgctcaataccggaaggatgttaaatccatcaatctttatatatgccgcaaatccggccataaccgttgccccgaaactattcacgctcgtctgtacgatcagattcgaaagtgaaattacaatattctggattcccgtcgggattccgatacggatgattttggaaagcagatggtcatagcagcggatttccttaatcttcaacttatatacatcttcacttctgatcagaaatccccatataaaaatgcatgatatcaactgactgatatccgtagccagtgccgcgccaacgattccaagcttcagtccgacaaccatgatcagatccaggaatatatttgaaatcgccgcgatcatcaggtataccagggaacgtctggaattgcccacggcattcagaacacccgccgacatattgtaaactaccgaaaataaacttccgccaaaatatacctgcagatagattaccgactgttcaaataccttgtccggtgttcccatcaggcgcagcatcgatggtgtcactgtaattccgattacagtcagaagcactcctgctaccagcgcgatcgccatcgtagtatgtacggccttcctcacgccttctgtatttttggccccataaaactgcgagatcacaacacctgcaccagtcgatgctcctatgcagaaaccgattagcaggttaatgattgcaccgctggatccgactgccgccagtgcgttacttcccacatagttgccgacaataatcgaatccaccgtattatataactgttgaaacaaattccccagaatcagcgggattgcaaaaaaaagtatttctttccagatcacgccctctgtcattgtcttcatctttttcatgtttctctccctcttctgtctaccatgttctaaattactattctattcctattttcattttccggcaatatgttttctttatatttcttttgattttctcccggtatcaccaaaaaatgtattgacaaaatcacctgattcattgtatagtatcaatgttgcatatcacttatgcatgctgccttggctcagtcggtagagcgtcgccttggtaaggcggaggtcggcggttcgattccgctaggcagcttaaaagaaaagctctgtaaatcatgattgatttacagagttttttatttttttagttcttcttttcttttgctttcattctgttccttccgctttaacgattgccttcggcgtactataccacactttctgatatgatcctgtatcctttttcaaaattgcctgcatcagccggcatatttccattacctgatcttccatcttattgtcaatcgttccatacatttcacccgacataatcttctggtgcatttcttcactgttattaatcccgatgatcactggaagtttcagatttttttctttgtaataatcatataccccaagtgccatatcatcgttattgcagataacagcctctacgttctgtactgcctcgtcatctaatgccgcaaacttttcataagccagctttctcttccattcagccaggatatttcccttctgattcaacggaagttctgcacccgtttccaggaatccgcttgttctgcggattgcatcaaaatgtgattcttctccttctaccagtacataatccagcattccatttccattccagtcgagtattctgctttgttttttccagagatctttcaacagttccccctgcatcacaccggccgctctggcatccgttcctacataccagacatttttcgatattttcaagtccttttcatcaatctccctgttaaataagatgactggtatgtctgcatctttggcgtcagtcagtacacttgccgccgacgccggttctacaagatttacaagcatcacatcgtaatcctgagcatacatctcctgcagctgtttttcctgacggctgccgatcccttctgcatcatagatttcataagatacttttttcccaagtattttcgtctgtcctatcttatcttccagttctctgatataactttccataaatgtatcgctacggtcatatactgcaattccgacatgtatataccggtcttctttttgcggcagtttccatgcgatcacaagtccggtcagaagaaggagcaaaacgatcagtatgagggtgtatttatctatcttgcattttttaccgtgtttcatcttccgatcaccttgaaagcagcgcatcatattcaccgctttccatcctttctttatccagtcttaccggcttcagacaaatattcttcgcttaatttatatttgttcttatatacgatgtatgccagaatgactccgattgtcggtacgatacacatcagtacacggatagaattctgtgttgccagcgactgtactgcattcggtacatatccggtaagttccagaccggttcctgtcttaacgatcacacctgcaactgctgtcagcgcaatgttattcgggcatgcaataccaacgatcagtaataagatcaacccgattggcgggagtacacatgccatcaggaacgctttctttctggataacacctttgttaccttcggaaagatcagaagtccgactacttctgcaaccgatgcactgatcataaatgcagataacattcccgcattattacatacataactgaagtaataagttgcaactcccataattgcctgaattgccacgttatataaaagaatcagtaatactgcccatcttaactgatcattcttcttaatgacagtaaagaggtctttgaatttcatcttgtccttttcctcaacatcatgctggatcttcggcagattgatcacacatacagccattgtaaaaataaatgttgctgcaatgatcagtgcaaatctgtgatatcctgtgtaatcaccaccaagtcctttaataatctgcacaccgaagcctgcaatgatcagtgactgtccgatacttgcaaaaattcttggcaataccgatactttttcacgttcctgtggatcagaagtcagattcggaatcactgaccagtatggaatatccataatggtataagtcattccccataaaatatatacaaccgtcgcaaagacgcaaagcttcacacctgtcagatgaaaatctgtaaatacagttacaaatacgaacgcattgatcagcgttccgattacaagccacggaacaaactttccaaaacggcttctcgtattatccacgatcattccataaatcaaatccttacccaatgccccaaatgcaaatgtatactttactcttccgggaatctttccctggtatactacactgctcttactgttatttcccattcctctttactccttcttacatttttctgcacagctctttagcatgaataaagtttaacatttgggaatgcatatgaacatttgatattctattcaaaaaatatgaatttctatttggtatctaccgaacctgccaccggcaacttctcttgcatactttgatatctacaggaccttccactggcagctccttacgaatacatggcaataaaaacagggcagcctgcgaaaagactgccctgcatataaattgtatttccaatttattaaaaatttctatttttcatatccgtttggattctgtgactgccatctccatgtatcggcacacatctcatccagccctttttcagccttccagcctcgtttttaggtcaacttttttgctttagaatttccccatgttggagtcagcacaggctgggaccttgtagttttattccggtcggtgacagccgccatgatgcattaaatagaaaattacttcttcgctgtctgtctctccacccaaagcttatcagccatcttcgtccaggcctcagcgtaaggcttacatttatcgcaaagatgctgtacatcttccggtgactgtggatcggtagagtgagcaccggtctcttttaccatctttggtaagcattccggattctcaagcattggacatgggcgcagcatgttgtcattgaatggctgtccttttcggtatgcctggaagattggactctttaatgcatccagaagactgacttcatggatattggcattcgaataatggatgaatacacaaggatctacatctccggctgcattgatgtgcaggtagtaacgtccgcccgcgatacatccgccgatgtattccgcatcattctggaagtccagactgaagattggtttggagcttctgaaagcacggatacgttcgtatacagcttttctctgctctggatttggcataagttccggagcggcgtcatttccaactggcatatagtggaagaaccagatgaataaagcaccggcttcgatgatcatatcgtagaattcttcacttgtgatatctttgtagttcatacttgtataacaggttgagataccaaatggaaggttgtgttcttttaataactgcatagcatgttttactttatcaaacacaccaggaccacggcgtccgtcattggcagtttcaaatccttccagactgattgcaggaacgaagttcttaactcttaacatttcctgacagaattcttcatcgatcagtgtaccatttgtgaaagataagaattcacagtcaggatgacgttcgcagattgtgatgatatctttcttacgtaccattggttccccaccggtatagatatacatgtatgtaccaagtttctttccctgtgttacgatgtcatcgatcgtttcgagagaaagattcagtttatgtccgtattctgcagcccagcatccggtacagtgcaggttacaggctgaagtcggatctaataaaatcgcccaaggaacattacagtcttctttttcctcggtttccttctgaagagcagaacccttcaaagaagcgttaacaataaagtttgtaaagaaagtttttcgtacacctggatccagctcccatactttctgtgcaagctgataccaattacctttttcggcgataccctgacggatcgcattacgctgactttcataccagccttctggtgcagccttgtcaacgatactcataacctttggaatattagtttcaggatccttatccatgtagttaagtgctgcctgaatagcggaagcaaaggcggcgttttttactgtgtctacaacattcatagtgttacctcctcattttactgcattatattctctttgcagttaccttatcttaaaacttttgattttcagattcaagcaaatgcgacattaatcgtatattgtcgtattttggcaattgccatgcaaaaagaatcagcgtttattcaggcattgggcaaatgatagttcctaatttttgcagttggaatcttcattaccggaatctgatagcgtatgtccgtttaaggaaatatctgttgttgtctcgtctccatagaccagggaagctgcgtaatgttcaagcttttctaccagtgcacgggaggcttcatcaatggagtaataagtgccggattcaaatctggctgcagccggaaagcagaagagcggccataagacaaggcagtgcgagtacatgtagatgtttcatgagaaatcccccttttcataaaataaatcttgttctccgaattataacataggtcgcttttgtgcttcaaattgtaaattgtacttataaaaaaacgaacttttttaattatacttataaaaaggggtggaaaaataagaaggttttatatataatagggatagaaacgttcaaaaccacataggaaaaggagatgtattcatggaaatgttatcaatcgagaaggaactgcagggcaattcttacccgggacgtggcattattataggaaagagtgcagatgggaccaaagctgtaactgcttactttattatgggaagaagtgagaacagccgtaaccgtgtgtttgtagaagaaggggaaggcatccgcacacaggcatttgatccatccaaactgactgatccaagcctgatcatttatgcaccggtacgagtacttggcaacaagacgatcgtaaccaacggagatcagacagataccatctacgagggcatggacaagcagcttacatttgaacagtcactcagaagccgtgaattcgaaccagacggaccgaactacacacctagaatttctggtgttatgcatattgaaaatggaacatttaactacgcaatgtcaatcctaaagagcaacaacggcaatccggaaagctgcaaccgttatacattcgcatatgagaatcctgcagcaggagaaggacatttcatccatacatacaaatgtgacggcaatccgcttccgagctttgaaggagaaccaaaactgatcgcaattccggatgatatggatgcatttgccgacagcttatggaacagcctgaatgcggacaacaaagtatcattattcgtacgctatattgatatcgcgacaggtacatatgagacaaagatcatcaataagaaccagtaagaggaatcgataaggagaatagatatgaacgaattagaactgaaatatggatgtaatccgaaccagaaaccttccagaatctatatggaagacggaagtgaactgccgatcaaggttctgaatggaagaccgggatatatcaatttcctggatgcatttaacggatggcagcttgtaagtgagttaaagaaagcaaccggacttccggcagctacatcattcaagcatgtatctcctgcaggtgccgcagtcggacttccactgagtgatacgcttgcaaagatctactgggtagatgatctcggagaattatctccgcttgcatctgcatacgcaagagcaagaggcgcagaccgtatgtcttctttcggagattttatttctctgtctgatgtatgtgacgtggatactgctaaactgatcaaacgtgaagtatccgatggtgtgatcgctcctggatatgaaccggaagcgctggaaatcttaaaagcaaagaaaaaaggaaactacaatgtaatccagatcgatccggattatgtaccggctccaatcgaacacaagcaggtattcggtgttacatttgagcagggaagaaatgaattaaagattgacgatgatttcttctcaaatatcgtgacagagaacaaagaactgacagagcaggctaagattgatctggcaatctctatgattacattaaaatatacacagtccaactctgtatgtttcgtaaaagacggacaggcaatcggtatcggtgcaggacagcagtccagaatccattgtacacgtcttgcaggaggcaaagcagataactggtggctcagacagtcaccgcaggttatgaatcttccattcgtggatggaatcagacgtgcagacagagacaatgcgatcgatctctatatgggagacgattacatggacgtgcttgcagacgatgcatggccggcaatcttcaaagagaaaccggaagtattcacaagagaagccaagagagaatggctggacaagctgaccgatgttgcacttggatcagatgcattcttcccatttggggataatatcgagcgtgcgcataagagtggtgtaaaatacattgcacagccgggtggatccgtacgtgatgacaatgtaattgcaacatgtaataaatatgatatggtgatgtcatttaccggaatccgtttattccatcactaatcgggatataatataagagacacatcctaaagttgatactatatatgtcgcagaaagcgggaaggttacgtaagagcgtagctttctcgttttttagataccaaagtattcaggaataaaagagttacgggagttactatatatcatatttatatatcgagtatatttggtttttatacaaatagaggaaaatgtagtacgatttcggtatctatatagcatttgtttcttcaaaaacgattctaaataggctaaaataggagaaaagaaagaaggcgatgcaattgtcaacgatggaactgttgatcgtatccgttggattatcgatcgatgtatttgtggcggtggcctatatgggagctggattttcaaagatcagatggaagaatctggtcttcttaagcgttctgtttggcggtatccagcttggggtactggtacttggaaacctgatcacattgctaccgttactgtctattaccagaacgaagacggcggctgacagatgggaaggtctgacagtgctgatctttgcggcacttggcatctatatgatcctcaaaggaatccgtaaaaagaaggtgttggaacgcagaaaagatgagatcgaatggaaaaaaacaacgtttcttgcactgataacgagtgtcgatgcattctttgtcggaatgggacttggattcctggatacagccatgatcgaagagtcattggtgttattcccggtaacggttctggaagcggtaatcggtatatttgcaggatacagactgggactgaaagaaaacagacgtgcatactgggtcgggggagcactccttttacttgccagtttcgacgtaattctccattattatacgtaaaaaatggagcaatttgacggtagatttttccggatagcaggggtataataatttactacaagttatctgagaaaaattaaggtgatgagatggagcgcaaaagtgaattaacaaaagcactattgggagaaaaatttaaagaactggtggcgaaaaaaggatttgaaaaactgacgatcaagataatcacagatgcagcaggggtgatacgtccgacgttctataattattttcaggacaaatacgaagtgatggaatggcttctgtgggaagacgtatttaaagaagtctcagaacttatggagcaagaacatgtaatggagtctctgcagcttttgttccagagatttggagaagacaagacttattacgaaaaggtatttgaagtaacagggcagaattcctttgaggagatgctgtatggacaggttttccatatggaagaaattctggtaaagcatcatccgttaaaacacttaagaaatatgccacacgtcgacgaaaaggtatttctggaatttcatgcaatatcattggtgaatggactgaaatactggcttatccgggaaagcaaaaatatttcggcgggagatgcaatggaattttatcagtatatgatgtcacattcaatcctggatctgttggacattgagaatacggagaaaaaataaagggtttcactacacagagtggaacccttttcctataatctcgctggtattggatatcagtaagaatgcaccagttgtatgagcttttatgaaattacgaagcttgattgcttcatttggactaagtacagtcaggatgatatatttgtcatcgcctgtgaaggcaccctgtgcgagtacgattgttgcacctcgtttcaggtcatttttgataaattcacagattggttccggctcgctacataccacgtggaaatacttcgagcggttcagactttcaatcagactgtcgatcagtgtcgaacgcatcgtaagaccgagcagtgaataaagacccgtcttaatgtcaaatacgaagaaaccggcgattgtgaataagatatcggaagcaagcaagccttttccgatgtcaacgctggtgtatttcttcaatatcatggcaataacatccgtgcccccgctggatgctccgatattgaacagaatggccgaaccgatggcaggaagtacaatcgcgaagatcagttccagcaatggttcgttggtaagcgggtggctcattggatagatacgttccagtccggacagcgtgacagaaagtaggatactactatatgcagtctgtgcagcaaattttttcccgagaacgaaaagccctatgatcagaaggagcatattcgcaatgaaggaaaaatcactggccgaaagaggagtgaacttggcaacgagtaccgcaaaaccggtgataccgccaaacgtgaagttgttggcgaacttgaaaaagtagatacccactgccatgatcagtgtactgccagtgagtagtgcaaagttttttaaatgttctttcatttgaaaaattccccagttttccttttgtaattatttggatatgaaagaaatctttcatatcctcaatgattgtaacgctcgtgtctggaaaagtcaacgtattggtggtatattattaagagacaaaatattcagaaaaatgaccgggaggataagaaaaaatgaagcttttttggcagaaggcagaagtacagaaatttgaacacgcaaaagatttcgcagaagaatataatataggtaagaatgattttattcttgcaagtaaaagtacatatgagacatattttgcaccacttgggctggaagcacatgtggaatttaaaagtaaatatggaaaaggcgagcctacagatgtgatgatcgatgcattgctggcagatttccgtaagacggattgtgacagaattattgcaatcggaggaggagctgttatcgatatggcgaagatcctggtgcttgcaggaaattacaccgccgaagagatctttggaaggaaggtaccgcttaaaagagagaagactctgatcgcagtgccgacgacttgtggtgccggttcggaagtttccaatgtatcaattgcagagtttacgaagttacatacaaagatgggacttgctgtcgatgagatctatgcagatcgtgcagtgctgattccggagcttctgaccggtcttccgtattcatttttttcgacaagtgcgattgatgcgttcattcatgcgattgaatcctatgtatcgccgaaagcaactttatatacacagatgttcagtatgaaggcaatggagatgatcattgaaggattccggaagattgctgaacatggggaagaatacagaatgaatctgctggatgatttcctgacagcaagcaatcttgccggtattgcattcggcaatgcaggaacaggagcggtgcacgccatgtcttatcctctgagtggcgtgtatcatgtcacacatggagaagcgaactatcagttcctgacagctgtattcgcaaaatatcaggaattagatccaaatggcagaataaagaaactaaataatttcttaagcaatattttaaagtgcaaatcagatgaagtatataccaagattgagaaacttctggatcagatcattgcaagaaaaccgttacatgaatatggaatgaaggaagaagaaatcgagagctttgcgaagacagttgaagagacacagcagagacttctgaatcaaagctatgtgaaactgacctggcagcagatggcagagatttataaagaattgtattaatttttatatataatagtgcaaaagagtgtgattcagattaaaaactgaatgttttgcttcggatcggaacatactatcttctataaagaggaggatagaaataatgtataagtatttacccattacggatgtatacgcaagagaaatacttgattcgagaggaaatccgacgatagaagtggaagtacttgccggagatgaattctgcggaagagcaagtgttccgtccggtgcatcgaccggaaaatatgaagcagttgaattacgggataaagaagaacgatatggaggcctgggcgtgcagcaggcggcagatcatgtcaatgcaaggattgcgccggaagtgatcggcatgaatgtactggatcaggcagcgatcgatcaggcgatggtcaggcttgacggaacaaagaacaaatccaatcttggtgccaatgccatgcttggagtctcgctggcggctgcaagagcggcggccggggcgttgggacttccgctgtattcgtatcttggcggcacaaatgtgaaaaaacttccggttccaatgatgaatatcatgaatggcggaagacatgcggataatacgattgatattcaggaatttatgattatgccggtaggggcgaaagattttaagaccggacttcagatgtgtgcggaagtatatcatgagctgaagagagttttgaaaacgctggaatacagtactgcagtaggagacgaaggaggatttgcaccggatcttcacaatgcagatgaggtcttgcgtttgatggtaaaagcggtggaaaaggccggatataagccaggcgaagagatagctatcgcattggacgtagcagcatccgagttatatgataagaattttaagaaatatgtattcgacggtgaggcaaagaaaaaaggatataagatcgtccgttcggcagaagaactgattgattattacgaagatatcatagaaaaatatccgattgtatccattgaagatccattggatgaagatgactgggaaggctggaagacgctgacggacaggctcggagagcgggtgcagctggtaggagacgatttgtttgtgacgaataccagaagacttgccaaagggatcagaagaaaagcggcgaatgcgatactgatcaaagtgaatcagatcgggacactgacggagagctttgaagcagtaaagatggcgcagaatgccggatataagacggtaatctcacaccgttcgggcgagactgccgattcgttcattgcagatatcgcagtggcggcagatgcagggcagatcaaaacaggagctccatgccgttcggaacgggtggaaaagtataatcaattattgcggatagaggaaagactgggggatgtggctgtatatcagaacccattcgaagaaaaaatagaaaatgtacagatataatgctgtctgacacaagatttcgaaagagattagcttgccttatcgtccatcctgtgatagaatatatgtggtttatccgcaggaggtgtgaatagtggacattttgaagattgtattaatgataatatttgcaatagactgtatcgctttaacagttatcgtactgatgcaggaaggtaagtcagcagggcttggtgccattagtggtatcgctgatacttactggggacagaacaagggacgttctatggaaggtgcactggtgaagtcgacaaaattccttgcgattctgtttattgtactggcagcagtgttgaatttaaaagtatttgcataggatagagcatatttttagaagatgaaagggacactcctgtatgggagtgtccctttttggaacacagaatatgcaggggagcatagagatatgagtaagaaatttgataaaagaaaaaaagttgtctatgatctgatctgtgatgatttatatacaccgatgaaattcaaggaactggcaatgcttcttcgcgtggcaaaagaagacagagatgagttaagacagatcctggaagcgttggagcaggaaggaaagatatatctttccaagagaggaaaatactgcaggggacatgcaaagcgtctgaccggtgtgttccgggcaagtcttaagggatttggctttgtagtgctggacgaaggagattcagaggatgtattcatcggtgcggatgatacctgtggtgcatttgacggagatcatgttgagatcgtacttacaaaagaaccggaaggaagaagccgtgaaggaaagatcgtgaagatcctggagcgggggctttcaaaagtagtcggactttaccgcatgaagccgggaaagaagtttgggttcgtgattccggataaccagagactggatcaggacatatttgtaccgattgaaaaatcaagaggggcagtggatggacacaaagttgtagtggagctgacctcttatggagagaatggaaagaaaccggaaggaaagatcgtggagatcatcggtcatctgaatgatccgggaacagatatcatgtcgatcgtaaaagggtataacctcccggtagaatttccggataaagtattaagacaggcagagcgtgttgcaaaaccggtcagcgaagctgacatgaatggaagaaaggatctgcgtgactggcagatggtcacgattgacggagaagatgcaaaggatctggatgatgcggtatcccttgtaaaagagggagaaaattatattctgggcgtgcatattgcagatgtgacgaattatgtgcaggagaacagtgcacttgacagagaggcactggaaaggggtacaagtgtatatctggtagaccgtgtgatcccgatgcttccacatacactttcgaatggaatgtgttcactcaatgcaggagaggacagacttgcactcagctgcatcatgacagtggatccgtctggtgatgtgatcgcacatgagatcgctgagacagtaattcatgtggatcgcagaatgtcctataccagcgtaaagaagattctgacggatcatgatgaagcggagatcttagaatacaaagaactggttccgatgttcgaacggatgcaggagctttcgggtattttaagagcccgaaggaagaaacgcggttccattgattttgatttcccagagacgaagatgatcctggatgagaatggaaagccgatcgatattaaaccatatgacagaaatgttgcaacgaagattatcgaggatttcatgcttttggcaaatgagacggttgcagaagattactactggcaggagcttccgtttgtataccgtacccacgaagcaccagatgaagaaaagatccgtacactggcaacatttatcaataatttcgggtattcaatgcatattggagttaatgaaattagaccaaaagaaatacaaaagttgctaacgaaagtggaagatacaccggaagaggcaatgatcagccgtctggcacttcgttcgatgaaacaggcgaagtatacggcagagaatgacggacattttggactggcggcgaattattatacgcattttacttctccgatccgaagatatccggatcttcagatccatcggatcattaaggataacctgcggggaagaatgaatgaaagtaagattgaacactaccagtcgatccttccggaagttgcaaagcgttccagtgagatggaacgtcgcgcggatgaggcagaacgagagacaatcaaacttaagaaggtggaatacatgcaggcacatatcggagaggaattcgacggtgtgatctctggaattactaaatggggtatgtatgtagagcttccgaatacgatagaaggtctggtccatgtaacaaacatgaccgatgatcattatgaatacaatgaagaacgttatgagatgataggaatgcatacacggaaagtgtacaaactgggagaagccttaagagtacaggtgctggatgcagatcgtctgatgcgtacgattgattttaagattgtgaatcagggaggtgccggagatggcgaagagtaatgacaagatggtagcaaataataaaaaggcatatcatgattattttatcctggataagatcgagacaggaattgctctgcacggaacagaagtaaagtcactccgtatgggaaaatgcagtatcaaagaatcctttatccgtattgaaaatggagaagtctttatctacggtatgcatatcagtccatatgaaaagggaaatatctttaataaagacccactcagagtcagaaaattactccttcataaatcagagatcaataaactgatcggtaaaacgaaggaaaagggaatggcaatcgttccattgaaagtatatttcaaaggcagccttgtaaaggtggagattggtctggcaaaaggtaagaaattatatgataaacgtcaggatatcgccaaaaaggatcagagacgtgaagcagaacgtgatttcaagatgaaactcagataggagaaaagaatggtacctacaaagaaagaagaattaagaaatctggttacccagacaacattagagacctacgaggagctgacaccacatctggtacagcttattaatgaaacgaacagaaatccggaactgacggaagctcagaagcaggatgagatctcattacatatgatgggatttgtaaaatcctgcaccaatgaaattattatagaagtacttggagaaattcttggtctggaataatgtagaaaaaatataagaaaaataagatcctgttgtgataattaaacgaaattgtgtgtgacgtcagaaaaatgtcagaaatttccttgacaaaaaaagttcacagcgttaaactacgggacataaaagcaagggcgcttcgaaagaatcatttcgaggcgctttttcttttatataaaaggatagcacaagggtgtgtacattttcgtgagtcgaccacggaagtgcacactctttttcgttatcggacatctgaaggatgaaggaggagacattatgacgaaagaagtattatcggcgatacaggatgccgtaggcacacaggtatttggaatctggttcctgatcggtgcagcatttgtatttttcatgcaggctggatttgcaatggtagaggcaggattcaccagagcgaagaatgccggcaatattattatgaagaacctgatggacttttgtataggaacttgtgtatttatcccattgggatttggaattttgcttggtgaagatgcacttggcggatttatcggaactccgacacttggaatttttaccgattatgcaaattttgactggtccaattttgtatttaacctggtgttctgtgcgacaacggcaaccatcgtatccggagcaatggcagaacgtaccaaattcttatcttattgtatttattccgcagtgatctccgctgttgtatatccgatcgaggcacactggatctggggcggtggatggcttgcaagtttaggattccatgattttgcaggttcctgtgcaatccacatggttggtggaacaacagcatttatcggagccgcactggaaggagccagaattggtaaatttaccagagataaagatggaaaagtaacaaaggtacatgcattccctggacataacattgtaatcggtgcacttggatgtttcatcctctggtttggatggtatggattcaacggagctgccgctacgacaggtccacagcttgcatcgatctttatggcaacaacgatcgcaccggcaatcgcaacggttgtatgtatgatatttacatggcttagatatggcaaaccggatgtatcgatgtgtctgaatgcttcacttgcaggtctggtagcaatcactgcaccttgtgatgtcgttgatgcaacaggtgcgatcatcatcggtgtggtagccggacttctggttgtatttggtgtatggttctgtgacaatgttgctcatgtagatgacccggtcggagcagttgcagttcattgcttaaatggtatctggggaacgatcgcagtcggtctctttgcaacaaaaacagcaccagagtgcacattgaaaggtctgttctacggcggcggattccaccagcttggtttacagctgcttggtgtagtaaccgtaatggcatggacgatcataaccatgacgatcgtatttaagattatcgataagacggtaggtcttcgagtaacagaagaagaagagattgtaggtctggatgtgaaagaacatggtctggcatctgcatatgcaggtttcagtctgatggatatcacagaaggaagcatgagtatcaatgagaatacagagcttggagaaaatgattatgatgaagcttcagaagcacagagagctgcatctgtcaaagtaactgctcctgtagatcctgagactggaatacataaagttgttatcattgccaaactttcaagatatgaaaaactgaaaactgcactcaatgatcttggagtaacaggaatgacagtcacacaggttatgggatgtggtgttcagaaaggtgccggtgagaaataccgtggagttgagatggatgtaaccgtacttccaaaggttaaagtagaagttatcgtaggaagcattccggtagacaaagtgattgagactgtgaagagaactctttataccggacatgtcggagacggaaagatattcgtttacaatgtacagaaggttgtcaaggttcgtaccggcgaagaagattatgatgcattgaaagatgtagagtaatagtgcataatcgaattgttagaatattgtgtaaaataacgaaaaaatatatagatatttaaaaaaagttatagatatgttatggtgtatatagaatttttattaaacgtttaatgtacggattttattgagacacaagcgaattaatcgacagaataaaaatattctgtcgatttttttagaaattttattaaacgtttaatatcattgcaggaggtgaaagaaagtagtaaggaaaacatgaaaaagaaaggaaagtgaataatgtctagagggaaaaaattgaaaagaaaagtgacatcgcttgcgttgacaacggcgatggcggtttcaatgcttggtgttttaccggagtcgacggtcgaagcagctgcatcagacgatgactcgatttccaatggaagtcttactgctgcaattggcgatctgggtgaaatatcaagattgacaattgacaataaccgcaaaaacagtagtggaaaagatgtgaattttgtgcttccgaatgataccaatcagcagaataacgaagcacatcagtggatgggagagatgatcttttcctaccgaagcagcaaagacggaaacttcccggaagataacagtggatttcaggaagtagatacgaataagacactggctgcaggtggttcaacaacttacagcaatgcatcagcaaacttaaagaacaacccatatattgaaaagaaagtaagcaaagataaggttgaggtcaccttcaaaggacaggatgaagattcgacagacagccgtacgatgaaaggctttaatgcaaagtctgtatacgatatggatacagatgacggatccctgctttggtcgatcacactggaaaatacgagtggaaattatctggaattcggggatgtaggacttccgatgccttggaataataagtacgcaagtattgatgatacttacaacaaccgtacaactgtgcatacatttgcgggagcagacagtggttatgcatatgcgatcagatgcagcggtgaaggaaactatgtaatgttcacacctgttacggacaccggtgcaagaattgaatatattgataactggaccggtaatattaacggggtaaaaggaacacgttccggaagtacttatcagaattggacaagtgataccggtggatggttcccgggacttcaggtgtattacattcattccaaagatattcagaaaacgggacgtggttattacacagatgctacaagtcttgtactgaaaccaggtgagaagaagacataccagttcaaattctcagcagtaagagccggtgataatacaccacagaacagcgcagaggatgcaaataatgcgtctgattcggtagaagaacgtgagaataatatgcgttccattctttataaagaaggaatgatcgacgctgttgcgactccgggattccagactgcaatcaatatgccgaccaagttggatctgcattatgatgacagtaagatctcagatgtatcggttgatatacagtgcgtgcatgaaaatgatccatgggatgaagaacatattccggatcagcagagtgggatggtcaataattccaaatccatagaacattcggatagtgattcagcaaaactggttaatacgaagacggtagatggggaaaaacatcatatttatgaattgaatttcggatgtatcggtaacaatagtgtacgtgtaaattacaaactgaatggtgaagataaatttacacagtatgaattcaatgttctggataaacttgacagtacgattgagacgcattcggacttcgtggcaaatcagactcaggacaatgatacatcaagtccgacttatggaatttacagtgactggtattttgcaagtggaaaagattctacacagcagtctcattggggagatgactggagccacgataatattaacttcatggcaatgaagaactatctggatccaaatgcttccgaggtagagtccatcgagaagtatctgattgattttatgtggaataattacatgaagaattcgcatgaaacatatgcagtagcgaattatctgagtggatcgggaatttatggtggaagtgccaatccgtattccagaacttattcggaagttatggaagcaaccggattctttaatatgtaccgcatagaaaaagcatatcctgatctgattgattacagagaaagtgcagaatggtatctggaaaaagcatatggaatatacagtaaccgcgtaagtgcatatccaatcggattttacggggaacagcagattccggatatgatcgaagcactttatgcagaaggcatgacagaagaaggagacaatctgaaacagctgtttgcaaaatctaaaggaacaagtatggcaacggccgcttatccatacggatcagaattcgagtatgataataccggtgaagagggtgcttattctgctgcaaaagcattgagaacctattatccggataatagtaacacaaaggccgcgcttaaaaatatgcagtccgcagagtggaaaacacgtgcgatgagaggacttcagccaacctggtatcagtatgccgatcctgtcttccgtggaggagagacctggtggaatttccagtatacagcatctcttgccggatatatcatggacgactggttgagatatgaagatacagatgcagacacagattccagcgcatgggcagagagaatgaactatgcagcgaagttatctaactttaatgctgtaaacatgggacagatttcttctaattatattggaaatacaagctggagatataccatgtcaaaaggtggatatggtgcacagaatgtaaatgacggaggaacacgtgtccagaataatggatggaacgatttctcgggagaaagtgatgagggactttatggatcgcttcttagcatcagtgcagatgttgcaacagatcctgtattcggactgaccggttatggaagtacagtatcaaaatccggtggaaaatatacgattaccccgctggatggtgttggaaaacgtatcaatgtgatcgatgataagctgtatgtggaactggaacaggattcttgcacgaaagcagtcattgataaagatggaacatattttgaccttgcagtaaagaatctgacaggggacgaacatctttcgaagatcagtctgagtggcgcaggtcttaaaaatggctattacagtataaaagtaaatggtgaagaaaaagagcagtgctatgtatcagacaaccagggcgatgcatacgcagtaattccggcaggtgaatctgccaagattacgatcgaggcaatgaaaggtggagaaaatcaggcaccaaagatctataagatcaaaacgtcagaaaatccacaggcactggtatcttcccgtatagaagctcaggcttatgatgacggcgcaccggatggcaaattgacttataaatgggaaacagtaaaagagccggaagacggagaacttacatttgatgccaagaataagccatatgccaatatcacagcaagcaaagacggaatttacaaagtaaaactgaccgtaagtgacggagaactgagtactgaaaaagaagtagagattgaaatcggacgtgcaccggaaaaaactgcaccggttattgaaagtgcaacagcaacacagcatccgacaaatacaactacggcagaactgagtggaaaggcttctacagataagacctatggaaataaagtagaatacaagtggtcagtggtagatcagccggaaggcggcaatgcaattatcgcaaatgctgaaaaagcagatgcaaaattaaaagcatatgtgccgggaacttacacattacgtttaacagcaacggataaaaaatccacagagtacgatgcagatgtggaatcaacaaaagatattgttctcgagatgaaagaaccggttgatggaattgaaagagcaggtacggtacttacgaaagtgaagacagagccggaacttccggagaaaatggaagtcatctatgaagacggaacaataaaagacagtgagattgtgtgggatcaggtggatgaggaatcctatgcacatgccggaaactttactgtaaatggaacggtaaaagatacagatctgaaggtagaagttacggttatggtagtatccggagaagcacagaacgtggcattgatcgcaacaccatcagcaattatcgatacaccggaggatctgggaggagtggcaggactgaatgacggatatgatccggcaagttcaaacgacaaatcacatggtgtatggcataactggctgggagataatggcgccgatgcatgggtgcagtatgactgggagtcagaagtgacgatatatcagtcagacgcatactattttacagatggtaactttgtaccaaaatcagtaagttatcagtataaagatgcaaatggcaactggcgtgatcttccaaacgtgtcaggctgtggtacagaactgaacaaatataatacaacaacatttgcgccggtaacgacaacagctatccgtatgaatatgagtccaaagacacaaggttgtggtgtgattgaatggaaagtatatggatatgcagagaatgtcattgacaaaacacttctgaaaaagacaattgacagtgcaaatgcgctggatcttacaaaatatgaactgacagaagaagacaaggctgcattaacggaagcaatccaggaagcagttacagtgaatgacaataaagaagcaacacaggaagaggttgattttgcggcagcaaaacttgcaagaatcatgtcatcacttccaacagcagacggtaacctggcatatggtgcagctgtatcaacaagttatgtatccagctgggaaaaagtaagtgctgtcaatgatggcaagataccggaaagctcatataatccaagtggtatggcaagatatggaacatggggtaatgcaagttcgaaagaaacagttacctatacatggaaccaggagatgaagctgacaggagcagatatctatctctggtatgacggcgatacagaaggagattatacaaagggtggaattaagatccctaagagctatacttatgaatatcttgattccgaaggaaactggaaagaagttccgaatccatcttcttatggaatggaaatggacaaattcaacaatacgacctttgatgaaataacaacgaaatctatccgtgtgacgttaaacaagcaggcaaatgatacgaacggtgtaggcgttatggagtggaaggtatacggaactgcaaaatatgcggatgaaaacgataaggcagatctggaaaaggcagtgaaggatgcagagacagaagaggcaaacctttatacagaagacagctacaaagcattcgaagcagctttaaaaacagcaaaatctgttcttgaatcagaaaaggtaagttccggagaagtcaaagcagcacttgcagcactggtaaaggcacagaataatctggtgaagaaagcagaagacaagaatattgctccgaaggcagcagtagacggaatctgtaattatacaacagatcttggaggtcttgcacagcttaataacaacattgacccgtcttcatcaagagattgggatggaagtcaggtagacgcaggcaaaggaatgtggcacaactggaataaccgttatgatgcagatggcaatgtagtgaatgcatgggtaagttatacatgggattcagaaatggtactggaaagtacagatgtatattacggtacagacggtggcggaatccagcctccgaaatctgtgaaattcgaatatctgaacgaagcaggtgaatggaaagaagttccgaatgcagaaggacttggttgtgaaaaagacaaatacaatacaaccaaactgggtaacatcaagacaaaagcaatccgtatggtaatggaacctgaattcttaagtgatgcggaccctgcacatggaatcggagttcttgagtggaaagtaaacggaacgaaagcggcagatcttacggccttaaaagcagctatccaggaagcagaaggaaagaacgaaagtgattacaccgcatcttcatggaagacatttgcaaaagcacttgaagaagcaaaggcagcagctgctgataatactgttacgcaggaggcagcagatcttgcaagaacaaatcttctgaaagcagcaaatgcgttagtgaaaaaaggtgaaaaaccggaatatgataatatcgcaccggaagcgaaagcagacggaatctgcgattacaccaacgatcttggcggacttgcaacattaaatgatggttatgaaccaacagaatcccatgatacatcacatggtgcatggcataactggaataacagatatgaaaatggtgttgcgaagaatgcatgggtaagctatacctgggataaacctgttgaaattaacagtatggatatctattatttctcagatcacggtggaatcgtggcaccaaagagtgcaagctttgagtatctgaatgatgcaggtgaatgggttgtggcagatgaagcacagggacttgcatgtgtggaagatgaatacaatactgtaaaacttgcaaacattaagacaaaagcaatccgtatgactatggaaccggagtttatgaatgagggagatcctgcacacggtgtcggagtgattgaatggaaggtctatggcaaatatgcagaggacaagccggaaacagtagataagacagcattagatgcagtgatcagggaagccgagtcacgagcagaaaaagattatacaagtgacagttgggagacatttgcaagagtactcgaatctgcgaaggcagttcagaaaaatgagtctgcaacacaggaagaagtagattccccgttcatgtaagagtaaagtacaatcttcagaagtgtttttggcgatactgaatttattctttcataggtagaatacaggtcagtcaaatccattccctccacaaactgacttagtaatcgcacagaatcatcttccggaatgattgtttccaaatttaaaggaagttttagttgatatcctccttcattcaaagtataattcttatgtaaaaatataggttttcgcatacttatattttacaccaacagccggacttttcgaagcccggctgtattttttcatcgaaaagaggctgcgcactaattgcttagtgcgacagccccttatagcgataaataccttatcttgaattccgtataaacaggttataaatttaaccttatcacaaaaaacacgggatactattttgattcatacagagagagaaacctataaaaacacgggataaaacatttatcgctataacataagcgtcagataagaacgtgtagagacaagcagcgattatagaaaactcccctgctacttaaaatgggagcaggggagttgagatgtcaatgacaataaaataatctttaaaatgcagttttccattatttctctcatcatctggtgattattcacatgtcttttccttatattagaaaaattaagctttaatccatttgccaatccatttccttgttgtttgattatatctacatttatacaagacgccatttaaggttttatatttccaaacaatagtgtgcgaagccggactgatttctggaggcgtagcatccgtcgaagcagcataaacatttgaagtaataagcgtatgattagcaaaagctatagatgatggcgttgtcagactaaaaataaagctgcagattaaagtgataaatagtgttttagtcgttttcatgaattggttccccttccttgtagcgtggcaatctttttaagtcttcagagaggtggtcgatgtcggcaaagaaccttccttcgtaataaatggtatattgtttggttccgtgatcaatgatataagcgttatcttcacggagctctactgcgccgtctgtcaccggatacagctcccgaaaattaggttcagggacgcagaaaacagagaatatgaccacagcaaatatggccgtatggcacagatacccgtgtacacgcttaaaacgggaagtattttcctgattatttaagataaagtagattcgtgtacttagtacagaggtatcatttacggcaaagtgcatcatgcggctgggctctgcgagcctggcgctttgtattctttttgcggtttttacaatcagttcagcgtaatcggtgacactgaatttcgggttggattgtatcaggaaaaagtcgttggaaagctccagaaagagcataaattctttttttaaatgctgtacaaaaggattccaccagtgtatgcggcagataatttccatcagaaatccaagccataggtgatgctctttatagtgcgcaatctcatgcaggcagatgtacttaagctccgtttcggaaaagctttgcccatcgggcattatcaaaatcggatgtaataatccagtgatggccggagagattggctccgggataagggcaatccgtatcggtttggcaaggtattcctgtaaaaactcgtacagatatgcatatgcgccttctttttcaacaaaaaatgcagagagcgcatggtgcagccgtatatactgaaccaggagccgcaacagcaggataaaagcgaccgtaaaccagattgaaaatatcagcgtatccacccgtagacggcagccagcaatattttgtgttgtaaagtctaatatccttggcaggacctgataagactgaaacgaataggtaaaaggaaaattgaaaggtatactcatgcggattaaaataacaagtataccgattaacgaaaattgtatcgtgcgtttgtggaaaacggatgtgtggtgcatgatgatatgcaggtacaccgtgagaaaaagcgttacaataaagcaagtaaaaaaaggtccaaatgaaagcgccatatttaatttcctccgttgataagaatgtgtttgcgctgggctatcatctcttccagatgctctaattcatccaggtctgtttcagtatcgatcaatgaagcaattaacgcagatttctgcccgtctccgagtatatctgtacaagtattgccaaaatactcatcacgggaaatgactggcgcatagcttctggtaagcaccgtaccgctgtagacgatatctgccactttaatagaatggttcgcaatcagtgagcggagacatgcctgtacggtattgatattcaatgcatcgtctttcctgacaatatcggatgcaatcattggcgtagcgctttcccacagaaccttcataacatccagttgcttttttgtaaatcgtttcttcattattatatcacctcgctttttatgataattgttcggatagcataatcattgcataaaaaagaaaatatgtccatactaaaaaaagataaaaataaaaaaagaatatttttttaataaaataaaaaaatttgattgacaaagcaaaaaataaatgacatattaaaaaagtaattacaaaggaattccgaaacaacttaaaagaaaaaaggaagaacaattatgggtaactttaaagattttgatcttgacttaaagaatgtagcatcaggtggggaagcggagccaaatggattatcaaagattacgactaagattacgatcggcgtatccaaaatgtcattaaagaacaagtgtaaatctgttgatacgccgacaacaggaaggtcagcgatatgctgcaagaggacgaatgctgcggctgaacctcagtgtatctaaaatgtaagagcgtggcattttgctgcgctcttttataaaaaagaatcaaagggaaggtgtgaatatggagacaattttattttcaaaaacagataaaataaaaatcgttacatttgtagctgtagcttttggattgccgtggttactgttaccgcagatacgggtagaggggattttggcgtacaatataccggcgtcgtacatgatgattcttccgactttcggtattatattgggaagaattatctgtgagcgaaaaattcatgggtggtttcattggatttatacaattgcttttatcgagagtactgcggtgatggtattgtgtgcggcgaaagtaataaccgggaaagcggcagatgatatgctgacggtttcttctatggcattgagcatcgttcttttattgggcaggatgattgacgagcaggaactttatccgtttaaagatttaaaaaaggccattggcatttatattatgtttgtagccattgcgcagatatcaaaccttccgcagcttatacatgccggagccttgcgcacggcagatgagattgtttccaatctactgtttgcgccaatcgacattttcgtggtgcaaagtatatattttttcggggaagaatatgcatggcgggggtgcctgcagggacggctgcagaatatattcgggaagcgcatgggcgttattttgctgggaatcatatgggagctgtggcatatgccgctgtggttccagatctctgagccggggcaggggaagctgattgtactgcttgttttgatgcgtatgccgtatgttattgcgctagctgtatttttgggatgggcatatatgaagacaaataatatctggctctgtgttttgattcatggagtcaataatgcggcgggggcagcatttgattctgatttagtaactgtcgccgatacggttgaaagtgtaagcgtctttgacggtattatgaccgctgttgctgtgattgttatgctgctatttctttttacgaaggaatacagaaaaggggaaagagtatgaaagtagttggttatgcaggaagtcgctccgcgttttcaaaaagcatctgtctgggagaaaaattgaaaacaatgctgcgagagaagaacatagaaatggaactgtatacagccagaaacaatgtagtggaggagtgtcggggatgcggaaaatgttttgatgaagggttatgtccgcaggatcaagaggatagtatggaatacattagaaaaaaaattctagaagcagatttaattgttttactgtcgccagtctatttgaataatgtgtccggcgcgatgaaaacatttcttgacaggattggatcttgggttcatactttggcactttccgggaaaatgggattgtagtgacagtgacagatcaaagcggacaggaatttgtttcttattacttgcagaagctccttttacagatggggtgtaatgtggttggagagtataaggttgtggcactagaggaattagatcaggaggaagttatagaaagaattgtatccaatatcgtaaaagcattttctgatcaagaacaatatataagcacggctgatttagaaaatacgtttcagtatctgaaggctagatttgtcaacgcggatatggaacagtataaagatgaatcctatgagattaaatattggtatgattccgggatggcagagtgcgagacttttcaggaagtgctgaaccttagaaaattacaatgcaggagtgatgtacatgaagtctgaggttaaagaagaaatacagacttatatacggtatattaatgagaatgacttcagagacaagtgtgaggaatacattcagatgtttttttttctatcgcaaatgatgttagaagagagtttgggagcggacgaaagagtaattcagtcaatggcgcaaaagatggtaggactactgggacaggatctggatatagattttgcttctccgaatgatggaatgtatgggggattgggagtgcttacgttttcagctcatgagatcatgggaaggacaggagagttaaaagagacttcagaattgctggatagatttttattagatcaagcgtgtcagaaagcagatttgttccagcagaggaaactttcgtttggttcgtacgatatattaggcggaattgcaggtgtggtatattatctgctggactgtgaggaaatactgaaccagccggaggagaagctgaaattgcgggatctgatacggttcttaatctatttgtcaggagattattcttattgggggaaacaaattcttcgctatcacataagaagaagacaacagtttcttgcaatagaacgaaagacgatgaaacagggacatatcaatttcgggatggcacatggggttgcgggcccgctcgtcgctctggcgaaggcgaagagacaaggaatccaggaaatgtatctggaggaagcaatctggaaattattcgggctgtatgaggaattatgtgtggagaataatgggattgttcgctatccgagaaggcttccgattgactgttatgtcagcaaaacgagcgctgatcttacggagaatgccgggtggtgttatgggaatctggggattgtccgcagtttaatgaagacggcgaagtatttaaggaagccgatggaatatgcgtattatctggataaattggtggatattttagcacagcccgcaaaggaatacaatctctccagcccaatcgtatgctacggatatgggagtgtgatttcgatacagaaatatgcctttctggaaagccaggatgaaaggtgtcttgtgaacctggagagaaacgtggagatcacactgaaagagcatagaaagaaaatgcaggatgaaggttaccgtaaggatttttcgatttgatcataagtatatttttgcaatggggactgtgacagttataacggctatctgttccccaatgtctacgctggtctcgcaaagtcttatgaacagtttgcaggaaagaagaagcctaaagatgcttttggtgcttgcggcaatttatattggaattgatttgtttcagatgctgatcgagtactttctggattactataagtacacatttgcacaggagtataatctacatttgaatcaggtgtagtaagtttgaagagacttcttaatcaatcaaatttaaagagttggagctccaaaatgattaaaaagtctcttgaggcttatttttttaccttaaagaacaaaattgtattttgtaaaaaacaatttcaaaacatgtccgtattttgtttcgtcagtacagagattgtgtaaggaactttaaaaagatgacacgaaatcaaaaaagatgcagtaagggggctgtaaaaagacctctgagcatttcgtttagtgtaagaatcttttttacttcttacacgaaccttgaaaacgaaacagcctgcccgtagtgataccagaactgaataggcatttagcgtgtcttttctggttaatacgttccggaaacatcagaacccggtacaggaacggatatgggatgagaacaggcaattaataaacaaaggaaggaggacatctgactatgacagagaaacagggattcatgacagcgttgtatgaacgtcttagtcgtgatgatgaattaaacggggaatccaacagtatttcaaatcagaagaaactgctggaacaatatgcaaaagaacatggatttaccaatcttgttcattttactgatgatggtatctccggtacaagatttgatcgcccaggctttcttgccatgatgaaagaagtagagtcggggaaagtcggaacgattctgattaaagatatgagccgaatgggaagagattatctgaaagtcggacaatatatggaattgctgcgacagaagaatgtccgcctgattgcagtcaacgagaatgtagacagcttccgggaggacgatggttttactccattccgaaatatcataatgaatggtatgcaagggataccagtaaaaagataaaatccactttcaaggcgaaaggaaaatccggcaagcatgtggcaagtacaacaccgtatggatatctgaaagacaaggatgacccgaatgtatggattgttgatgaagaagcagctgtagttgtacggagaatctttcacatgacaatggacgggtacggaccatatcagattgccaaggcactgaaagaggctaaggttgagataccagcggttcatatggcaaagaaagatgccggattatggaaaggcagagtagaagaaatcaaagatccttatggctggggctcttctactgttgcaggcattctgaagaaaagagagtatcttggtcatacagtgaacttcaagaccagaaaacatttcaaggataagaaaagccattatgtatctgaggataactggacggtgtttgagaacacgcaggaagcaatcatagatcaggaaacttttgacaatgtgcagagaatccgaagcaatgtgagaagatacccagatggatggggagaagcccatccactgacaggtctgatgtattgtgcagactgcggttccaaaatgtatgtccaccgggtaaataatggcaagcgagtgccacaatatacctgttctgcatattctaaagttccggttggaacactctgccagacacagcacagaattaatgccgatgtggttatggagctgattaaggaactcttaaaggctgttgcggagtattcacagttgaatcgtgaagaatttttggagacagtaaaaaaggcacagacttcacagcagtccagtgagattacaagattgaaaagcagattggcagaggcaaaaaagcgtgtgcaggaactggaaaaactgatctgcagaatctatgaggacagtattcttggcaagctaccagatgaacgctatgcgattcttgacggacagtattctaaagaacagaaagatttgtcggcagaaatcgcagatttggaagctgaattatcaggctatgaagaaggtcgcagatcagcggagaagtttattgctctggttgataaataccaaaattttgaggaatcgaccacttacatgctgaatgaatttgtagaaaagattatggttcatgagcgtgaccgaaaaggaagcattgagacaacccaggaagtggaaatctattttaattttattggaaaatatttaccaccacatttcggtgaggtggaaatgacaccagaggaaattgaagaaatgaagaagcgggaagccagaaaagacaggcttcatcagaattacttgaaaaggaaagcaaatggcaagcagcaagaatactatgaacggacaaaggcaaaaaagaaagcggagatggatgcaaaaaaagaggaaatccgtcaggaagatattgcaaagggtgtgttcgttccggtatcactgcttccacctgcagaaccgaagaaaggagttgcatcagcatgagcgaattagaaagaatcattcacgatgacagcaatggtctggattatatccttgtcggggaaatctatctgccactgatcgctgtacccgaagagaaaagagagattggtttttatggaagtcttcacagaaactatctgaaggactacaaaagtggcttatattcctatctgacattgaccggaaagctttggacttaccttgcagacttaaatgagcagtgtgtagaacgcagagatttcctcatggaacagattatggagcaggaaggcattacggaagaattgaaaagcagagatcagatggaatgggttcgccgggcaaacaatgcaagaagccgggtagatgaaattattttaaatgaactggtgtatgtgtaggagggacttatgagataccggattgaatatgcagacggaagatgctgtaattttgcaaacagcagaaaagatttgctggattggctgaaagcattgaaagatgaaaaagttgttgatatccgtaaagtgtacaaaaatggagttacagattctgtgatagacagctatcgtagttatctgaaacagtaaaggggtggacagtcagcaatatgatccattcaatgaaaacttggaaatgaaattgcaaaagatatttcagaaactgtcagccaaacagaaaacaatcgtatttgattacatgacggacacatcaaataaatgcagtgatttgaatgaattctattaccgtatgggattaagagatggattgaggctggaagaagtaatttaagtcatgctggatgtattaacggagtgataattgtgaaaagaatggttcaatagcgggagtaaaggcagtggcagttattatcattatcgtaatgaaataattgagaagaaattctcacaacagaataaaatacttggaaatattgaaaagttcgcttaaaatcaagctttatagacatttttcttcaaagaaaaggtatcgcagaataccgcaaaatatcgtaacagatttttagaatggagtaaatttggaataaaagttgaaagaaaatggagtaaatatatcaaagatgtaaggaaaaatggcgtaggtagtagaaacagtatctgcgtcattttttttgattataatggtgtgaataattataaaatatgatatgataaacaaaatataaatgaaatcagggcaagtaacatttaaaagacgtggataaacaagaagtcctatcaagagtgtaagcgtaagcaagtgatgaaactctttatagggctttttctagtatctgattagaaaaagatgtgaaatatgatttgctatttgttatcgactataaatatgtgaaaaaccttgaattttcgcctgtcaaagattatttgcgctacttttttaaagtgtgtaaaggtaggttgctagcttttttttagaatatgcttattcacatgttattttgtcttatacctatgcgaaatacgcattgcataacaattcgcaggccaattatgcgttttatggattaccaaactcaacaaaaatgcatttgatcaataaagctaatcagatgcaggcaatgggtggcattccaagtggttacgctgtgtattatttcaatacatcttacaaccatcagccaatggcatttcaggttaataatgtagcaactttatcacttagaaaatcatcatcgaacacagatatcacaaatggaaatagttgttattctttagcaaatgcaaaatacggagtatatagcaatgcagcatgtacttctcaggtatccacatttacaacaaatgcaaatggaacctcgaattcaatcaatttagaaccgggaacttattatgtaaaagaaatttccgcaccggaaggttactatattgataacacagtgaaaacagtgagtttatctagcggtgagaataaagtagttagctttacagataaaccgatggatgacccggcagcgattgttattcagaaaaaagacaaatatacaggtaatacaataaaaggaaagaaaacattagctggagcacagttcactattaaatattatgatggattctatgatcgaaataatcttccagcaagagccacccgtacatgggttattgaaaccaaagaacgtactagaccaaatggaagcaaagtctatcaagccggtttatcagatacctataaagtaggtggagataatttttataaggtagatggagcaattactatccctcgcggaacaatcactatccaggaaacaaaagcaccggatggataccgtaatgatttaaacatgacggatacaaaaggcaatagtactgtaaatggtgtataccttgcacaggtaacgaagccaggagatttgtcaactttaatgggcggacagacatttgaaggatccgacagcccggttcgagcagatattaagctgacgaagatcaatggaacgaataataataccatggcaaatattccgtttaagatcacgaatctggaaacaaaggaaagccatacaatttataccggaagtaatggtgtatatgattcttcattgattaaaaagagtatgaatacaaacacagataaagcgggagccggtgtctggtttggagatacatctattcttagtgatgatgaagggtcttttgaatacggaagttatagcattgaagaattagagtgtaaagaaaatgatggaaagattctctataagggaacttttaaaatcgataataatacaggaagcacactggatcttggaaaaattatcaataacaacattgaagtaaaaacctatgctgcagataacaccagcggaaataacaatacagcatttatccagcagggcggtattttcaattatacaaccggacagcttacttacggtaaagccattacggatgaagtcaatgtaaaaggtatttcatccggttatgcagtagctaatttggtagatatggaaactggagaatatatcaaaaataaggatggttccactgtacaatcggaagcaaagattgaaccttataacgatggtacttataccggacaggcacatcaaaaccttgtttatgataatccagagagcatgcttggtaagaacattgttgtatttgaaaagatttatgctttaaacgcggatggaacaccaaattacaataaactgcttgtagaacatttaacggattaacaaaatgtacaagtataaaaataaaaggaatgtatgccccgaatattaagaaatgtgtcaattcatttcttgactgtacatcattaactagctttgatctttcaggattaggaatgagcaaagcaacttactttaatggtatgttcgggcgtatgagtaacattacatccattaaccttagtggatggtcaacatcaaatgtaactgatacaacaaacatgtttacggaatgtagaaaactgaaaaccatttacgtgtccgaaggatggagcgtagcaaaggttaaatcagatacaaatatgttcagtaattgtacaagtatccgtggaggttcgggaaaaacatataatcaaaatcaatggggtaaatccatggcaaattacagcaatggatacttaacctataaagcttacacagccaaggctaatatcgccgccccatcctcatcagtcatcatcagctccgcaaaagcaacagatggactgacagtggaagaaatcctgaataatgactctgcatttacagatccgataagagcggtcaatgaagagagtacagacgcagaaaatgaagacgcggatacgcaaaatgcggatgtggctgtacagagtatggatgatccatctggaaagcttctgtattcgcatagtgatctaaatgatgagaatgaaacatgccacaaagatatcaatgatgcaaatcagaccattaaagttaaaggatatcgtgactgtaccgtgatcaaacgcattaaggccgatgattactggaaagagcatggtgatccaacctttatcttcaaacttacaggaacggatacactgggagcttcacatacttattatcagagtgtcacatttactgaaagctatgtaaaagcacatacggacagtgacggatacgtagagatgaaagcaatctttggtcaggtcccggcaggggaatacacatgttccgaagaaagcgtcagccgatttgagtttgaatcattgaccaaaccggtaaatgcaaccattaacggaaaaacagcagtataccatctgacggataacgatacggcatgtgcaacatttaccaacaaaaaatatgaagagggagacttcggacatgacagtgtagtagtcaaccacttcaatcataagacacaggattaagatcttgataactggaaggacctgcttcgataggaagcgggtcttttccggtatatggtaattcatatatatcacagtagaggtttagcggctgccattcttacatactttatatagggagtgaaaaaaataatactgtaatgttcataacatcaaaaaaaacttagataacaggaaggaggctcgctatataagcagacaggagcgaaaaattttttgtctgcaaagacagtagggacacgaaaaatgcaactaaatatagttgcgcataatttattttcagtatatcctaaagataggagaaaaagtgagcaaaaaggaaaaattaattcaaaagcttaaggctcaatcaaaatcattttcttatgaagatgcaaaagtcttgttggaatatttagattttttggagagcaataaaggaaaaaccagtggatcacgggtagttttcacaaacaaactgcatggaaatattatgctgcataaaccacacccacaaaaagaactgaaaaaatatcaaatcaagcaattaaaagaatttcttgaacaggaggatctgatatgagtagcgttatgaaatacaaagattatatcggaagtgtagagttttcagaagaagatcaactcttctatggaaaagtcctcggcattcattccctcatttcttacgaaggtgaaagtgccaaggaattaattcaggattttcatgaagcagttgatgattatctggaattatgtgtagaaaaaagaatcgagccggaaaaagcctataggtataagggagtccacgctattagtatatatccaacaaaatagagggggaatatataatgaaaaaaatattttttgaaacactaaaacataagtttggtcattatttactggttatattatgtggtatactaatggtttcgacaatatatgtatcatatgcatttagtgacagtattgaaggaattatacatggacaaaattctggcatagtggaagaaatgtacacttttattaattttcaagagacatatattctcttgtttatattaatggtactggttattatttcgtacatacaaaaaaaatcctatgattatgttctgcttgatacgatgggattaaagaaaaagcatagatatatgtttattggatttgaatatgcagggattatattttcctcggtaactggtggcttgattttaggaaaaatattagcagagtgtgcaaaaacagtattacaaaatatcttttataatacaattactacagaggttaattatggatttattgcactgcggaatacattggtgatttcatgtgaagttttcggcatcctattcattgtttttgatgaattgatagcatgtctgggaatggatgcattgttgactgttggaaaaaagaacgggaaaccactgaagaagagaccgaaaactttactgattgggatatttttgatcttgattggccttataagtctgttgttttattggggaaagatatcccaaagtattccgactgtatttttgaatgcgggcatgtgcctgcttatgattagtttggcaggatactatttcgttcggttgaataaaaaagagaagaagtattataaacgaattacatggttggaaaactggtatcatagattcttttataatataaatatgtcatttgtcgttgcagcatttcttgtaattattatgacggatttttctataaaattattggataaccttccgattaccgaaccgaagaattatccgtttgacttggtatggatggcaaatacggatgacgaagaatttttgaatcatttaacagatgatgaaggggttgaactgagaaaagtaccatgtgctagagtgacaacgacagatattgctgaacatatggggattccggcatcaacttatgaaaaatggactggaaaatcgctagatttgaaagacaatgaaatatttgttgtatatcaaagggagaggtttgaacgaaacaaagtcggaattggttacaatacaaaaaatccattaatttatataggaaaagcaagggctgatttatggttgtatataaaaggcgtagcagcacctaaagtacagtattttacagaaaaattcaaggttgtcggaacagaagacagaattctaacaggtgtgtttggaagtgaaacatgtgaacatattattgtattctcagacgaatattatcagaagaactgtgtgaaagcagatggggcgaatatggctgttatgatgaacatacctgaaaattatgataaagttgtcgaagaaataaaagcgtatgcccaagatcattcccaggtaaattattttgacgcggataatgggaatctgatttacgagaagaaagagctgctgttagaaagaagtaaaacaaagcttttatacgtggcttcagcagcgggaaatattatcattatgcttttgtgtggaatatttgtattgagtataaaaatggagtgtgattttccggagacagaatggaaataccgattttatattcaatcaggaatgtcttctgctaaagtcagaaagggaatcataaaagagtgtctgctatcaggaggactgcctgttatatgtggcacaattatttcaattttgtattgtagtatgcttttgtatgcgaaacatttacagattgagtgggttcatagatactttaaaggaataattttgattgttggtgctatatggttgctttttgctgtttttatttttatatttgcttatagaaatattagaaaaatagagggagatagtggaaatggaaaaaagtaaaaaaattttaaaagtggaaaatttaaaaaaggcatattactcaacttcccgaacaggagaaatcattacttatcctgttttaaataatgtttcatttgagatagaagaaggtgaatttgtagggattatgggacgttctggttgtggaaaaactacattattaaaggcagtgggaatgttagacaaaccagatgacggaacaatatattacaaagataaagatacaaaagatatataccgggctgaactggcaagacttagaagaacagagattgcttttgtatttcaggattattatcttatggatagtctgtctataaaagaaaatattatgcttccacttattttggatgaggcagatgttcaggagagtaagaaaaaatgtgaagaaatggctgagaagtttgcaattgcggatttattggataaaaaaccatatgaattatcaggaggagaaaaacaaagaactgcgatttgccgcgcattaatctacaatcccgatttaattttggcggacgaaccaacaggaaatctggactctgcctcatcagaggttgtaatacatactttagaagagattaataagaagatggggaaaacaattctgcttgtaacacatgatcctattatagcaagttcatgtgatagaattattttcttaaaagatggaaaagtaaaggaagacctgaagagaaccggagataaggaacaattttataatgaaataattacaaactggtgctgatttgcaagtgcttatataaaataaaccttgttcatgaatcgtattcaattactacgataatggcaagtgctttaagatgatttacagtgtctctgactgagtattccaatgaaaatagaaaaataaaatagtatgtgaatattcccgtgcggaagaacccctgagtccggacagccgggacacggagcccggattattcagacaaggacgatgaactgccgtggctcagttaccagcactttggcaatctggtaggcaacctcacagatctgattgtgctggaacaaaactggcagctgatgattgatgaaatctggaatacccgtcaggtcaatgactatggatgagctgtatctggcaagagcacgatatgaagaaacactgaaaaatgatccggaatttgatgaaaacttagattttgttttgtttagggatcacgggaaggcaatcgcaagaccgtattattattttaagaaactaatgaagaaatgtaatattgattgtacaaaacatgtatggcacgatttacggcacacttatgcaacactgttagatcaaaacaatatgaacatgaaagtagtatcggagatattaggtcattattcagaagaatttacaaatgaagtttatgtcattcataaaccagaggtcatcatctatgatacaagtgaagtaatgaactcatttattgagtcattaaaactggactcaacagaaagaaccatacctgtatatgatatttcgttcattcaggaatatttattttaaactattctgacaattcaaatttttatttattaatttaattttagtgttacatttttaacaaagcttttggcaaaaatatgtaatacttaatgcttatcaatgatttttaatcgttattaaataagcgaaatcttttgaaacagaaaagaatttttgcagattttaaaatttttaaaactaagatattttgttacaacagaaaagcaacaaaaatacaactaaaagtagttaagataagagatattttaacaaacatcaaaaagctataaatcggaaaaaaatcttctaaatatacatttgttatatagaagtaacaaacagatagaagaaatacactataatattaaaaaaatcacaattttatcgccccaaagacttgaaaaagaaattcgcgagtagtacaattgtgttaaaagattaacacaatattttaaaaggagcgtgtttgaaatggcaagatttacattaccaagagatgtttatcacggaaaaggatgtttatccgaattaaagaatctgaaaggtaaaaaagctgtcctcgtagttggcggcggatctatgaagcgtcagggattcctggataaagcagtgaactacctgaaagaaggcggaatggaagtcaaactgattgaaggtgtagaaccggatccgtctgtagagactgttatgaagggcgcaaaagtaatgcaggaattcgagcctgactggatcgtagcaatgggcggtggatctccaatcgatgcggctaaagctatgtgggtattctatgagtatccggatgagacatttgagaatatcatcacgccattcagtttccctgaacttcgtcagaaagcaaaatttgcagccattccatctacatcaggaactgcaacagaagtaacagcattctccgtaatcacagattacaatacaggaatcaaatatcctctggcagactttaacatcacaccagacgttgcaatcgttgatcctgaactggtagaaggacttcctcagaaacaggttgcttacacaggaatggatgcactgacacatgcgatcgaagcttatgtatcaacactcaactgtccatttacagatccacttgcactgcaggcaatcgagatggttttggattatctgccggcatcttataacctgaatatggaagcaagagagcagatgcattatgcacagtgcctggctggtatggcattctcgaatgcattacttggaatcgtacattctatggctcataagacaggagcagcattctcaaccggacatattcctcacggatgtgctaatgcgatctatctgccatatgtaatcaaatacaatgcaaaagataaagtggctgcatcacgttatgcagagattgcacgcagaatgggacttcctggaacatcagaaaaagctctgatcaacagcttgtgtgcaaagattgatgagttcaatgcaaagatgaatattcctaagactctgaaagaattcggaatcaacgaagaggaattcaaagaaaaactggataagattgcagaacttgcagttggtgatgcctgtacaggatctaatccaagagcaattgatcctgcaacaatggctaaattatttacatgtacatattatggaacagaagttgatttttaaataacaaaaatcagataacggcggctgtcacataggtttatgtgacagccgttttgcgtactttggtataaaaatcaaaatctattccatatacaacagagcgaatcttgaacaattttatcgacattttttgaaaaatatggttttacttgcgaaatagaacaagccgtattatgataatagtaatattgggaattaggaggaaataagatgtacaaaattttaaaagcagaacaattaactgctaacatctttctgatggatgtagaagctcctcgtgtagcaagacattgtgaaccgggacagtttgtcattgtaaagatggatgaaaaaggggaaagaatcccactcacaatctgtgactatgacagagaagccggaacgatcaccatcgtattccagccggtcggagcatccacaaccaagatgaaagaattaaaagcaggagattatttccgcgatttcacaggtccgttgggaaatgcttcagaactcgtagaggaagatatcgaagaactgaagaagaaaaagatcctgtttgtcggaggcggtgtcggagcagcacctgtatatccacaggtgaaatggctccatgaacacggtgttgatgctgatgttatcatcggttcgaagacaaaagatatgttgatcctggaaaaagagatggaagcagtatccggaaattattatccatgtacggatgacggttcttacggtcatgccggaatggtaacaacaatggtagaagaactggtggaaaaaggaaataaatatgacgtatgtatcgcaatcggaccaatgatcatgatgaaattcgtatgtctccttacaaagaaactggaaatccctactgttgtaagtatgaatccgatcatggtagatggaacgggtatgtgcggagcctgtcgtctgcatgtaggagatgagatcaagttcgcatgcgtagatggtccagaatttgacggacaccttgtcaacttcgatgaggctatgaagagacagcagatgtacaagactcaggaaggtcgtgcaatgctgaaattacaggaaggcgacacacatcacggcggatgtggtcagtgcggaggtgacgagtaatggcagatgtattaaagaaagttcctgtaagagaacaggagccaaaggttcgtgctacgaattttgaagaagtatgttacggatataataaagaagaagcaatggaagaagcaaccagatgtctgaactgtaagaatgcaagatgtatccagggatgtcctgtatccattaatattcctgcatttatcgcagagattaaagaaggcaatatcgaagaggcttacaaagtgattggtcaatcttctgcacttcctgctatctgcggacgtgtatgtccacaagagtcacagtgcgagagcaagtgtgttcgtggtatcaaaggtgatgcagtatctatcggtaaactggaaagatttgtcgcagattatgcactggaaaatgatatcaaaccggaaaaaccggaaaagacaaacggacataaagtagcagtcatcggttccggtccgtcaggacttacctgtgccggcgaccttgcaaaactcggatacgaagtaactgtattcgaagcactgcatgaacttggcggtgttctggtatatggtattcctgaattccgtcttccaaagcagaaagttgttaagaaagaaatcgaaaaagtcaaagagcttggcgttaaattcgagacaaacgttgttatcggtaaatctacaaccatcgaccagttgatggaagaggaagattttgaagctgtattcatcggttccggagcaggtcttccgatgttcatgggaattcctggcgagacagccaacggagtattctcagcaaatgaatacctgacaagaagtaacctgatgaaagcattcgatgattcttatgatacaccgatcgcagccggtaagaaagttgccgttgtcggtggtggtaacgtagctatggatgctgccagaacagcacttcgtcttggcgcagaagtacatatcgtatatcgtcgtagtgaagcagagcttcctgctcgagtagaagaagtacatcacgcaaaagaagaaggcgtacagttcgatcttcttaccaatccaaaagaaatcctcgtcgatgaaaatggatgggtaaaaggtatgaaagtaatcaagatggaactcggtgagccggatgcttccggaagaagacgtccaatcgagatccctggatctgaatatgagattgaattagacactgttatcatgtctcttggaacatctccaaacccattgatctcttctacaacaaagggacttgagacaaacaagagaaaatgtatcgtagcagaggaagagaacggacagacttcaaaagctgccgtattcgcaggtggagatgccgtaacaggtgctgcaactgtaattcttgctatgggtgcaggtaaagcaggagccaaaggtatccacgaatatctgtctaaaaagaatgcttaattctttgtgcacagtgaaaagatgatgttataagcactcataaatatgtacaacacgtaattatataagagatatacatgagaatgattctggtgtatatctctttttgcttaccatgcgttcgtaaaaagctgccagtagcaggtcctgcagacagtacatccagacttgaataaaaacatatatatgtggtatgattgtaagacacatttaatgctgaaaacagctgaaaatcaatcctgctgatatgtaaggataaaacaaaaaaagacaggttggagattatgacagaattagatttaacagacggaaagatatttttaaataaagtaacagagaagatccgcacacgcctggccgaagtagatgcatccatcgaagccggacagaaagacatccagagtatgaatgaatactactgggagaattacaccgagatggatgaatacggctatgaaaattatgacaaccagcaagctcttttacaccaggtcaatgacaatcaggaaaaactgaagatgcagcaccggcttcgtaaaatgttggaagctccgtttttcggacgtgtggattttatctatgatggcgaagacgaaccggagatattctatatcggcatcggtaactttgcggaacgtacgggtatgctgcctttgatctatgactggagagcaccggtcagcgggcttttttacgattatgacaaaggccctggatcttatgaggcaccagccggactgatcgaaggtgaaattgccgccaaatggcagtacaaagtgaaaaatggaaagatggtctatgcattcgaaagcgataccaagattgatgatgatattttaaaacaggaacttggaacgaacagcgatgtacagctcaaaaatatcgtccgtacgatccagaaagaacagaatgcgatcatccgtaatacacatgaccgtatccttgcaatccagggtgctgccggaagcggtaagacttccgttgctttacaccggattgcctatctgttgtatcatgacagagagcatttgaaatcctctaatgtactgatcctttctccaaacagtgtattttcagattacatttcccatattcttccggaactgggtgaggaaaatattcaggagatgagttttgacctgttcgcataccgggaattgaaaggtatcgttccggactgtgaagaccgctatgaccagctggaaagaaccatgaagcttcaggacccgtatctgacagaacgctttgaagagaagcagttggaaggctttgtcggaatgatggaaggattccttgcaagactggaagatgaactgatggatttccgtgcaatcgaatataaaggaattcagaagacagaagaagaactgatcaatctcttttatttcaaattccagaatgcacctctgctcagccggatggatgcaatcagagattattgtgttgatgaatacgagacattacttggacgtgatctttcggaagaagagctcctgatcgtacaggagaaattcgataagatgtatgtaacaaaggacatctacaagatatacggctggcttctggaagaatgcggatacccgtcacttccggatgtcgaatatgaaaagcgcaaactggaatacgaagatgtatttcctgtattgtatctgaagtaccgcctgaccggaaaagctgtgcataatcacatcaagcatctggttattgacgaaatgcaggactattcttatctgcagtatgtgatcctgaatcagatcttcaaatgccggatgaccattctcggtgataaagcacagactttagatgaacagatgcgtgatgtattgcagttccttccgggcgtatttgatcagaagatccgcaagatcgtgatgaataaaagttaccggaatacaatggagattgccagatatgccgaaaaactgactggtgtcaaagacgtagaacttttaaaacgtcatggaaaagaagtggtagaagaacaattccagacagaagatgcagttctggatgaaatcctttcaaaagccaaacttggagaagacgagtatgagactgctgccattattaccatgacggaagcagaggcatccaccttataccagatattaaaagcccgcgacgaagaagtgcattatatcgaccgcaacagttccgtattcaaaaaaggacttaccgtcacgaccttttatcttgcaaaaggtctggaattcgaccaggtattcggtgtgttccaggatgccggaaacccgatgttgaatcaggcaaaatatatctgcgcaacaagagcattacatgaattatatatgtatcagataacagaatagaagaacactaatcactaaggcagaaaaattattagcagaatagatgtgcagaaattagtttttcgaaagattattaattatagttaaaattaaaaaaagcagagatagaaagaacaatagaatgaagataacattaatcacagtgggaaagataaaagaaaaatatttaaaagatgcaatcgcagaatacagcaaacgtctaagccgctactgtaagctggagatcatcgaggtggcagatgaaaagactccggataatgcaagtgagaccgtagaagatggtatccgcgacaaagaaggagagcggattctcaaatatgtcaaggacgatgcctacgtcgttacacttgaaatcaagggaaaacttctgacctcagaagaactggcagaaaagattgacaagcttgggatccagggaaccagtcacattatatttatcatcggcggctcgatcggacttggaaaagaagtgctgaaacgctcggattatgcactaagtttttcaaagatgacatttccacatcagctgatgcgggtgatcctcctggaacagatctaccgaagctaccggatcatcagccatgaaccatatcataagtaaaatgccgaaataaaagaaaatattatagaaacaattgtagatatataaaagatattataaaaaattcttgtttcaaaagatatcatcctttatactaataaggatgaaaatgtcaggagaggatatactatgaagcaagtgaatttaaaaaatctgtgtatgatcttgttggggaatacagtttatgcactggcgatcgtcatgtttattctgccaaatgatatgatcacgggcggaacgacaggactgggtattgcaatccaccattatttcgggcttccaatccatacatttgtattaatcttcaatacattgatgttcttacttggagcggctgtccttggaatgaaatttgcacttacaacactggtcagtacattctattacccggttattctgggtgtgctcgaacagataccggcacttcagaatgtaacagacgataagatgttatcaacaatctgcggcggtctgatgatcggaatgggaatcggaattgtaatacgctgcggtgcatcgaccgggggaatggatattccgccgttggttctcaacaaaaagttcggacttccggtatctgtgatgctgtatgtatttgattttataatcctgatctcacagatgcttttcaccaacaaagaagagattgtatacggtatcttactggtactgatctataccgtcattctggacaaggtactgctgatgggatctaccagaacaaaagtagagatcatgactgaaaaatacgaagaactgaaccgtctgatccaggaacgtcttgaccgcggaacgacactggtctatacacagaccggatatctgagaaacgatcagccgatgatccttaccgtagtttccaatcgtgaacttatgcgcctgaaccagctggtacaggagatcgacccacatgcatttatgatcattggaaatgtaaatgaagtgcgaggaagaggattttcacagcagaaagtttataagaaagaaactatcgaaaaataaaaatacgcagaataatacagaaaataaaaccgacagactgtgcccgggaatctgcttcgaatgaagcagattcccgtatggtacagattgtcggttttcctgatttttaaccttttttcttgcgctctatacatttccattcggaattctcacagatgaagtgccagtattccagaagcttttcagatgtctttctgtcctttccgcggacgatgaaccagatgtcatctgcgaatgttcctgattctgtttctttttcattctgtccgtcttccggatttgacatctttacaggtgacgccgttgtaagtttgatatctttgtaacggatgatcctctcgatttcatcctgaatcttcagatattgttctgtaataccaagctggcggtattgctctgccaggcggattcttttatttctcccggataaaataacatacgtgacaacagatgttatgattgatgcaataatcacaattgccaatatgatcaacacaagaagtggtgtagccatagataatcgcctccttacataatatggctcattataacaccgatatcctagaaaaaccaccgtgaaattgtccgtattttcctcggtttatgaatggattttctacaaaactactgttataatagataaatatatcaggcggatataattactatgttactttggtatctgccaaaagataaaaaacacggaggtacaacatgaaaaaattcgggaagatcttaggtggaatcatacttggaattgtattgattctcctggcggctgttgccattctgacagcgctggaataccgtccggatcagatagagactttgaacacaaccagtggaaaacagtccatatctacgggagattcgatgacgatcctgacctataataccggatatgccggacttagcaaagacgaagatttctttatggacggcggaagtaaagtcatgccggagacgaaagatctggtaaagcacaatatgaaaggaattgccggcattctgaatgatgcagatgccgatgtctgttttcttcaggaagtagacattgattccaaacgatcttatcacatcaacgaaaaagcttactacgaaaaagcactgggtgtagatggaatctttgcatgtaatttcaaatgcgtatatgtcccatacccgcttccgacgatcggtaaagttgaaagcggcctggtaacatattctgattacaaagtatcggaggcttccagaatcgcacttccggaatctttcaaatggccggtaaaaacctgcaatcttaagcgctgtatgctggaaacaagaattccgataaaaggcagtgacaaagagctggttctgatcaattttcatctggaagcttatgacagcggagaaggtaagatcgcgcagcggaaagttctggtgaagaagttaaaagaagagtatgaaaaaggaaattatgtgattgccggcggggactttaaccagacatttgatggaatggacacctatccgatccacgataaagacagctgggttccgggaaaggtcggaaaagaagatatcccggaaggattttcttatgcagtatccgataatgtaccgacctgccgcctgttaaacggaccatacagcggtaactatgatgattcacaggtatatgtactggatggcttcatcgtttcggataatctgaagatcgatcaagtggaaaatatcgacacacagttcgaatataccgatcatcagccggtaaaattaaatgtaacattaaaataatataccaaaatataatctgtttatcagcctgcctttcccggcgggctgatttaacatagatttaacatatatctaatataagtcggggaatgctatgctatattaggaatactggaatgaatatttcggaaaagaaaaaagtaaaaaatacacagagaaaggtgagaaaacactatgagcagcatatatatgaaccgggaactttcctggctgaaattcaatgaacgtgtactggaagaagctgaaaatccagaagtcccattatgtgagagactgacatttgcatcgatctatcagagcaatctggacgagtttttcatggtacgtgtgggatcattatatgaccagacacttcttgacaaaaagatccgtgaaaataagacaggcatgacatcacaggagcagattgatgcaatcttaaaacgcacaaaacaaatcaataaacgcaaagaagcggtctatgaagaactgatggaacgtgtggcagaacagggcatccgcattttacgtttcaatgaactcgatgaagaaggggctgcatatctcgagcgttattttgaatccgagattgcaccattgatctcgcctactgttgtaggaagaagacagccattcccattccttagaaataaagaaatctatgccgtagccgtacttggctccaagggcaaaaaagaccgtctgggaattattccatgcaccagcaacatcttcggacgcctgatcgcagttccgggaatgcagggcacctatatgctcgccgaagaactgattctgcatttcgcaccggcggtattcaaaggatataagatcaaatcaaaatctttactccgtatcacaagaaatgccgatatcgatgcagatgcattgtacgacgaagatctggactaccgtgaatttatggaagggctgattaagcagagaaagaaactggcaccgatccgtctggaactttccagagatatcgacaaaaaaggaattgccgtattatgtgaatatctggagctagatgaaaaccatgtattcatatcttcaacaccactggatctgtcgtttgtattccagatccaggatcttctcagaaagcatacggaattatattttccaaaacgtacaccgcagcgctctgaccagttccaggatggaaaaagtatcatagaacagatccgggaagaagacaaactgttatcttacccatacgaatccatccgtccgttcttacatctgctgacggaagcggccgaagatccggatgtcatctccattaagatgactctgtatcgtgtggcgaagcagagtaaagtggtagaggcactgatcgaagcagccgagaatggaaaagaagttgtcgtactggtagaactgagagcccgttttgatgaggaaaataatatcggctggtccagacttctggaggatgccggctgtcaggtgatctacggactggatggctataaagtgcactccaagctgtgtctgatcacccgcaaaaacggaggtcaggtagagtacattacacagattggtaccggtaattacaatgaaaagacatccagattgtacaccgacctttctcttatgacagctaacgtagagatcggactggaagcttccaatgtattccaggctttgtcaaagggtgaagttgtagagcacagtgaacatcttctggttgcaccgaaatgtctgcagaataaagtacttgccatgctggatgaagagattgcacatgcaagaaatggagaagaagcttatgctggatttaagctcaattctcttacagataagaagatcatcgataaactgatcgaagcttccgaagcaggtgtgaagatcgatatggttgtccgtggaatctgctgcctgatccctggtgtggaaggaaagacagaaaacattcgtatcatcagcattgtcggaagattcctggagcattcgagaatctatatattcggaaacagtaagcgcaggaaatactatattgcatccgcagattttatgacaagaaatacagaggttatggcgtcaaattctgttgcggtatgttctaagggagctaacagtacatggctggttaatgaggaaaattcagttctggttgaatatgagccgcgtaatattgcagaaactatggagtattatttgaaaaatccagagaagcttgcagaaatcagaaagaaaggattaacttttgcacagtcaacatcctgggaaaaagaggctgaaaaagtacgtgatgctttattgaaaggaataaaggaagatgaaagataagaaggttcttattattggtgggaatggatttataggaagaaatttggctaaaattttggttaagcgaaatgacttagaagttttttcatttgacttgtcacttccgagagaagaagttgcaggagttgaatatatggaaggcgattttttcgatgatcttgttcttgaaaatgctgttaagggaatggacttagttattcattcactgagtaccgtaaacccaggtaattctaacgagaaatatatgcagggttatggacgtgactttttacaaacaatcaaactgtgtaagatgatcatagatcaaaagtcaaatatgatttttctgtcttcgggtggtacagtttatggtgttcaggaagatcagccaattaaagaaactgcattaccagtacctataaatcactatggaagtgtgaaattgtgcattgaaaatgttattcgtacatttaatacacagcgtcatacgaaaatgcgaattgcaagaatttccaatccttttggaccaggacaggattatcataaaggagtcggctttgtagatgctgctataaagaaatctatttgtaaagaaacccttgaaatatggggggatggtgagaacatcagagactatatttatatagaggatgtttgtaagatgttagaggctcttgttgactatgacggaaaagaagaagtcttcaatttgagttcgaacgaaggaatcagtcaaaatatggttgtagatattttgaaaaagatagacggagaatttgatgttgtctataaagcagccagaagtgttgatgtcagaaaaatcgtattggataattctaaaatcaaacaaatatataaaggtgaaatccgaacatttgaaacgggagtaaaagagtattataattacttaacgaagaaaattaatacagataagaaataataaaaatccgcaggttataaatgacttgcggataatttatatgttttaagatgtttttataaaaaatactggataattatattagattatatattatgtacttgcgttaagtttagaggaaagagaattaacaaatgagaaaaaatatttcgtggaatttagtaagcaaatatagaactgaattaatgggatgttctatattgggaattatattgtttcattggtatgaaaactgcatgatacatggaaaaagtataaactttatactacatttattttcactggggaacagatttgtagaggtttttttaatattgtccgggatgggattatattattcgtttaaaaagcaagaaaatataaagacattctatttgagaagaattactaaattattgccaacgtacctcattttaggtattccatattggatatattttgattgttttcttaataaaatgaatattgggcaagtatttatagatatttcattcatatcttttataacagaaggaaaccggagattttggtttataggtttgattttgggcctgtatttgtttttcccaatattctacaaaattatatataaaaatgtaaatgaatggataggggtaggagaaatattaatactttactttttgacaacaatattaatatggaaaagttcaccgacggtatatgccaatatagaagtcgcctggggcagaatcccttgttttatagtaggaattgttttggggaaaagtatttttgagaaaaaaaggattggattaaaaacatttttaggaataggaattggcttgttaggagttttttgggggttgaaaataagtgaacacgtattgatcactaatattataaatagaagtttgtttggaattgttttgggtttgatttttttgctgatattgataataatgatgaatgctttggaatgttttctgatttatgagaagtttattagaaaaatacttgcttttttaggaaatattactatggaagtgtatatattgcatgtggcgtttagaagtatatttgattatccggcagaaatcggaaaatacatgatattaattggagcatctatacttattgcgattcctgttaatagaattggaaaatatatagttaatataaacagattaagaaggtaaaagtatcttatgaaaaaaccaggctactattcatcaggtgaatttgcccgcatggcccatgtgaccctgcggacaattcgctattatgacaaacagaatatattaaaaccatcttacgtcacagaagcaggtgcaagattctatacagacgaagatttcgccagactgcaacagatattacttttaaagtatctgggattttccctggatgatattcgagacatgacgattgatgatgcagattaccacttcatgctcaattccctcaacatccagttaaaactggttcgtgaccgtatcgaacagatgcagctggtggaacaggcaattcaggatacatcggatctgataaagaaagaacattccatcgactggagccagatgctgaatctgattcatttgaccggtatggagaagagtatgaagaatcagtatcaggatgcgtcgaatatttctgcaagaatcaatcttcacagcctgtattcacagaacaaacaggggtggtttccgtggatttttgaacaactggaattgacgccggggatgaagattttagagttgggatgcggagacggtacactctggaatgtggacaggaataaaatcccggaacagacagagattgtagtatcggatgtatcggacggaatgttaagagatgcaaggcgtacgattggagcagatgatgtcagattcaagttctgcgtatttgacgcgggaagaataccatatgatgcagattcatttgatcttgtgatagcgaatcatgtactgttctattgtgaggatattccgaaagtctgccaggaagtaagaagggtattgaagccgcatggcaggtttatctgtagtacatatggcaatgatcatatgagagaagtgagtgagttggttcagaagttcgatgaccggatcgtactggcggcagagaatctgtatgagcgttttggaaaagagaatggaaaagagatccttcgggcggattttgataagatagagtggagacagtatgaagattcgctcatcgtaccagaaccggagccattgatttcttatatcttgtcgtgccatggaaatcagggacagtatatcctggatcattacaaggagttccagtcttatgtgcgtaagaagacggaaggcgggttccacattacgaaagatgccgggatttttgttgggtatattggttgagaataatagaaatgttatgtataatgaaataaatgtctgaattaataatctcgtttttgaaatgcagtgtaattcctaaaacgccttaaatattacaagaaagttacaaaaaaataaaaaaagtacttgaaggtgacctaaggtcaccttttataatacaattaacacgaaaaacagagactagaaaaccttagaacttgataacctaatatacaaaacgaggaggttcctgaaatgaaaggaattattttagcaggtggttcaggcacacgtctgtatccattaacaatggtaacatcaaagcagttactgccaatttatgacaagccgatgatctattatccaatgtcagttctgatgaacgcaggcattcgtgatatcctgatcatctccacaccacaggatacaccaagattcaaagaattgttaggagacggacatcagttcggtgtcaatctttcctatgcagtacagccaagcccggacggactggctcaggcatttatcatcggagaagaattcatcggtgatgatacagtagcaatggttctcggagataacatttttgcaggtcatggactgaataaacgtctgaaagctgctgttgagaatgcagagaccggaaagggagctactgtatttggatattatgtagatgatccggaacgtttcggtatcgtagaatttgatcacgaaggaaaagctatttccatcgaagaaaaaccggcacagccaaagagtaactactgtgtaacaggactgtatttctatgacaacaacgttgtaaaatatgcaaaagagttaaaaccaagtgcacgtggagaactggagattacagatctgaaccgtgtatatctggaacagggaaatctgaatgtagaacttctcggacagggatttacatggctggatacaggtacacacgaaagtctcgttgatgcaacgaacttcgttaagactgttgagacacatcagcatcgtaagatcgcatgcctggaagagatcgcatacctgaacggatggatcagcaaggacgagatcatggaagtatatgaagtcttgaaaaagaaccagtacggacagtacctaaaagatgtactggacggaaaatacagagaaaacctgtactaggattttgaaacaatagataaacttaaaagcaggattttctcaacggaaatcctgcatacaataaaaattagaaaagaggaaatcataaaatgacaattatcgtaaccggaggagccggatttatcggaagtaactttgtatttcacatgttaaacaaatacccagactatcgtatcgtttgtctggactgcctgacatatgcaggtaacttatctacactggagcctgtaatggacaatccgaatttccgctttgtaaaagaaagtattacagatcgtgaagcagtttacaaattatttgaagaagagaaaccggacatggttgtaaacttcgcagcagaaagccacgtagaccgttctatcgagaacccggaagtattcctggatacaaacatcaaaggtactgctgtactgatggatgcctgcagaaaatatggtatcaaacgttaccatcaggtatctacagatgaagtatacggagatctgccgcttgacagaccagacctgttcttcacagaggagacaccaatccacacaagcagcccatacagctcatctaaggcagcagcagacctgttggttcttgcttatcacagaacatacggactgcctgtaacgatcagcagatgctctaataactatggaccatatcacttcccggagaagctgattcctctgatgatcgccaatgcactgaatgacaaaccacttccggtatatggagaaggattgaatgtacgtgactggttatatgtagaagatcactgcaaagcaatcgacctgatcatccataatggaagagtcggagaagtgtacaacgtaggtggacacaacgaaaagacaaacatcgagatcgttaagatcatctgcaaagaacttggaaaaccggaaagtctgattacacatgttgcagaccgtaagggacatgacatgcgttatgcaattgatccgactaagatccataatgaacttggatggtttccagagactaaattcgaagatggtattaagaagacgatcaaatggtatcttgagaacaaggaatggtgggagacaatcatttccggagaataccagaactattatgagaaaatgtatgctcaccgagaggagatttaagaatgaaagtattagtgacgggtgttggcggacagcttggtcatgatgtgatgaacgaactggcatcccgtggatatgagggaatcggttcggacatcaaagaaacatacagcggaattcaggatggtacagcggtgacaacaatgccgtatgtaccgatggatatcacagatgcagcttcggtagaaaaagtcctgacagaggctgcgccggatgtagtggtacattgtgcggcgtggacagccgttgatcttgcggaagatgaagataagaaagacatcgtaaaagctgtcaatgcaacaggaacaaagaatattgcagatgtatgcaagaaactggactgtaagatggtttacatcagcacagactatgtattcgacggacagggaacgaaagcatgggaaccggattgcaaagattacaaacctctgaacgtatacggagaaagtaaactggcgggagaacttgcagtgtctgagactctggataagtattttatcgtacgtatcgcatgggtatttggaaagaatggaaagaactttatcaagacaatgttaaatgtggcaaagacacatgatacattaaaggttgtaaatgaccagatcggaacaccgacctatacatttgaccttgcaagacttcttgttgacatgatagagacagataaatatggttactaccatgcaaccaacgaaggcggatatatcagctggtatgattttacgaaagaaatcttccgtcaggcaacagcacttggacatgaagaatatagtgaagagaaagtaaccgttcttcctgtaacaacagaagaatatggagtgtcaaaagctgcgagaccttttaacagcagactggataagagtaagcttgcagaaaatggatttaccccacttccgacatggcaggatgcgcttggaagatatctgaaagaaatcgaattctaaggagataataaaatgggacagattaaagtagaaaaaaatgcaggcggtatccagggactttgtgtgatcgaaccaacggtacacggtgacgcaagaggatactttatggagacatacaaccagaaagacatggaggaagccggacttacaatgcagtttgttcaggacaatcagtcatgctcaacaaaaggagttttaagaggattacatttccagaaagaatttccacagggcaaactggtacgagtcgtaaaaggttctgtatttgatgttgctgtagatttaagaagtgacagcgagacatacggaaaatggtttggtgtggagctgacagaagaaaataagaaacagttttatattccggaaggattcgcacatggattcctggtattgagtgatattgctgagttctgctacaaatgtacagacttctatcacccgggagatgaaggcggtcttgcatggaacgatcctgagatcggtatcgagtggccgacactgacaggagagtacaaaggaacagcttccggtgagggatatgcactggaagatggaactgcgctgaacttaagcgaaaaagatcagctctgggttggattaaaagatacattccatttttaaatcgccatgcgttcggaagaagctgccagtggcagcttctgtagatttaagataataaaagcttcggatcatacgaatccggagcttttttgttatcttaaactgttattcatataatattaagaatataaatattgctcaattattaactatatgttacaataaatcggataaaaagggaaaatatgtaataatatgtacgaggaatatcttaatgagtggtaaattagattatataaatatgataaaaaaagtatctccctataatttgaaaaaggggatactttatttgcgccattatggaccgaaaggattctggataaaattaacagaacgtttccagaaaagcgatattgattataaagaatggtatgaaaatcacagaccatctgaacaggaattagaaagagaacggaagcaggtatttgaatacagtcctaagatcagcatcctggtaccggtatacaatacaccggaggtgtttttaaagcagatgatccagtcagtgagaaagcagacttatacgaactgggaattgtgtattgccaatgctaatccttctaatcaggaagtaagtagtattctgaatgttgcaggcaagaaggacaacaggatcaaagtagtggatgttccggaaaatgaaggaattgcacagaatacgaacagagcattggagatcgcaacgggagaatttgtaggattgctggatcatgatgatcttctggaagaaaatgcactgtatgaaattgtaagctgcctgaacaaagatcgcaagacagatgtgctatatacagacgaagataaagtgacgacagatttggatgaatatttttctccgaattttaagccggactttaatttggatatgttgagagcaaataattacatctgtcatttttttgttgcaaaaaaagcattaattgaatcggtaggaatgttcagagcggaatataacggggcgcaggattatgatctgatcttacgatgtacggaacaggcggaaagaatctctcatgttgcaaagatattatatcactggcgggtgcataaggaatcaacagcagataatcctttaagtaaaatgtatgcatatgaagctggaaagaaggcaatcgaagatcatctcagacgatgccatacaaaaggagaagtccttcagacggaaaatcttggattttacagagtaaaatatcctgtgacaggaaatccgctggtgtctattctgatcccgaataaagatcaggcagagacattagataaatgcctgaagtcaatagaaaaactgacggattatgagaattatgaaattatcattattgagaataatagtacggaagagaagacttttgaatactatgaacagatttgcaatgataagatccgtgtcgtatactgggaaaaagaatttaattattcggcaattaataattttggtgcaaaacaggcaaagggagattatttactgttgttaaataatgacatggaagtgataagtcgtgactggcttacagagttgctttcaacatgtcagcgaaaagaagtcggtgcagtaggcgctagactatattatccggatgatacggtgcagcatgcgggaatcatcattggaatcggaggagttgccggcagtgtctttgtcggtatgaaacgcggttatacaggatatatgcacagagcagctatccagcaggatttaagtgctgtgacagcggcctgtatgatgatgaaacgttcggtatttgaagaagtcggcggactggaagaagagctgaaagtagcgtttaatgatgtggatctgtgtcttagaatacgggaaaaaggacatctgatcgtgtatgatccatatgtagagttatatcattatgaatctaagactagaggagctgaagatacgaaagaaaaagtgcgcagatttcagggagagatagaatatatgcgcagccattggattgacatattgaaaaatggagatccagcgtataatccgaatctttccttaaaaaaatgggactattccctgaaagtgaactaacggagaaattatgtgtgaagtaacaatcgtaatacctaattacaaaggaaaagagtatctgttttcctgtgtgaaaagtttgtatgaaaaggatcagacagaaaagaaaatcctgatcatagataatgcctcgaatgatggaagtatagaggaagttgtaaaagaatatccggaagttgaatgtgtgatgctggataagaactatggcttttgcagagcagttaatattggtattgaaaagacagatacaccatatgtgatcttgttaaataatgatacggtgataaaagataactatgtaaagtatctgctggattcgatcaagaaagatccgaacatattttctgtggagcctaagatgatccagtaccatgatccgtccaaaattgacagcgcaggaacctattataatgcacttggatgggcatacgcatatggaaaagacaaaagtgtgaagaaatacaataatataagaaagatttttgcagcatgcggaggggcttcaatctatcggaaaaaagtatttgaagagattggaatgtttgatgagaagcattttgcatatctggaagacatagatgtgggatatcgtgccaggatagcgggatacgataatttatatgaacccaaatcagaagtgatccatgtgggaagtgcggcaagcggagcaagatataatgaatttaaagtcaagatgtcttcacgcaataatgtatatctgatatataaaaatatgccggttgtacagaagatactgaacagtccgttcctttttgtgggatttttggtgaagtacctgtttttccttcgcaagggatacggaaagctatatgtcaatggtattaaagaagggctgcatatggggaaaaaatcagataaagtaaaatatgaatccggccatcttaagaattatataaagattcagatagaactatggataaatattttccggcgtctggcataggaaaacgaaataatagataaagttggtgagtaaaattgatcaaggaaaatcaagggttattaaataaaatacatgtggtactggatgcggtagtgattgtaatttcgtatgtgctttcatggtatctgagattcaggagcggcatttttgagatggatccgtggtatctttctctgcaagtatatatgagtgtactgatattcattataccgggatatctgttgctatattatatttttcagttatatactccgaaaagagtcagaggaagaagactggaagcatggaatatccttcaggcgaacacgataggctttctggtatttattttagtactttatttcagacatcagacagatttttccagaacgatgatctttgttttttactgtattaatatttttctggaaatagtagagcgtaatgtgatcagaatgggacttcggaagatcagaagtcagggatttaatcagaaacatatctttgccatttagtaccataaaagtgtagttgttagagaggaattaactctaacatctacacttattttattataataagggaagtagttggtatgacatattgccattaggattttcacatccgtgaatgaaaccgtcagccatccccttattataaacattcatttaagcaggttgaaactcgcaggagctttcgcgtaacgaactaaactgaatcataataagtgtagatgggataaacaactgcaattctataaaaagaaaaggagtatattatgatcagcgtaggaattgatgtatcaaaagggaaaagtacagtatgtattttgaaaccatatggagagattgttagtaagcctttcaatattacccatacccaaaaggatttaagcgaattatcttccatgcttttcagactaaatgatgaagtcaaaatcgttatggaagcaaccggaatttatcatcttccagttcttacatatttacaggaaaaaggattttttgtttctgtaattaatccgtatcttatgaaaagttatcgtaacgaaagtctgcgaaaagccaaaaccgacaagattgattcccgtatcattgctaattatggaattgatcattggtttaaaatgaaagaatttcaaatttctggagtgatttatgaagagttgaagttgcttggacagcaatatcggcattatatgaagcttcatcttttatctctcgctgaattgacccatcttttagatttgaccatgcctggaataaagaatcttcttgcaagttggaatgaaacaaatcggaaagataaaagaagtgattttgtggaacgtttttggcattatgatgtaataacatctatgtctgaacaggaatttactgaaaagtatatactttgggcaaaagaaaagaaatacgtcccaagccaggaaaaagccaaagttatatacaccctggctcaggaaagtattcccacattaccttcagaaacctcatcggtcaaaatgctggtgactgaagcagttcgggtgctcaaggaagttgatgcaacccttggtctaattttatcacggatgcaggaaatagccaagactttgccagaatattcggttgtaagagaaatgggtggagtgggaaatacattagccccaaagttaattgcagaaataggagatgttcgcagatttcgcaacgggaaggcattggttgcattcgcaggaattgatccaccaccgtatgaatctggccaatttgtaggttgtaataggaaaatctcgaaacgtggttcagcatcattgcgcaaagtaggatacgaaacaatgagaagtttaaaaatgcgttccagaccagaagatccggtttaccgatatgttgtaaaaaaggaatcagaaggtaaaagtaaaaaatcagcaaagatagccggattaaataagtttttacgcatttattatgctcgagtaaccgaactatataaaaatatataatcttatataaaataaataattttttagactgccaatcagacagtctatttgtggtacgcaaatatattttgtgacagaaaataaaaaagataaaaataattattgacttttcttagcaggtttcattcttaaggtattcgacacacacggaataaaaagtagaaagctgttccagtgaatgtgaagaaggtgttggaaatagttaagcgtcaaaattatgcgttgggttttcgaaatttgcctgtttgctgtttgaaacagcttatttagattatcatattcattgacgtttgtcaagaacttttttaatctttttcgaccagcttttccagctgttcgactgctatcctttcgtcaaacattcgtttgtctcaagcaacagcttattaagatatcataatcagttgtgtttgtcaactgttattttattctttttttcaggagtaatttctgaagatttctgattaccattcagcattacctgctgttttctaatcagttagcgccgtcttctgcttcgactctgttacctcacggtcttgtctaacgcgacgacttagttaatatatcacagtagtcgaactttgtcaataagtttttctaaacttttttattcatactgcttatatatcaactaaacggagaaagagggatttgaaccctcgcgccgctattaacgacctactccctttccaggggagccccttcggccagcttgggtatttctccaaataaaaactgctcgattgttttatacataacccgttgttatgcatatcactttctcaacatatctttctagcatacacagaattgctaccagcaacttttcctgcatactatggcatataaaaaactaccaggataaacttggtagtttttataaagcggagagggtgggattcgaacccacgcgccctctcggacaaacggttttcaagaccgcctcgttatgaccacttcgatacctctccatctatttacttgtctgccgcttccgtatcacctcagcgacaagatgtattctatcacagcttttcactgtcgtcaacacctttttcaaactttttttatttttttgtatttttcttattttcctgtatttttcatctataaatacacttatttttcattatttatacatagaacctgccatctgcagcttctattgcatattttgatatctgcagaacccaccatcggcaaattcttccaaatgcatggcaattcacagatcccggcacaggattattgatgttcaataaatcccttcgccgtttccagatcttccggtgtcgtaatcttaatattacaataagaaccctcgaataatttcacaggaatctgcatctcctgttctactaccatggcatcatcggttacattttccctgtcatgctgcatcagcttctcatacgcctgtgtaataagagctgtctcgaatacctgcggggtctgaacattccatacgtatttgcgtgcaggtgtagtaactgcaaactgattttcatctacgatctttaccgtatccttgcttggcataccggcaacacatgcacggttttcttccacacatgtataagccctctttataatctcttcgtctacgaacggtctggcgccgtcatggatatagacatatccttctttcgcttcttctcccgccataccgtcacggacagccttcagtccattccagacagagtcatagcgttctttaccgcccgaaactactgcgcgcacttttccaaaatgatatttatttacaatttcttctgtcacatagtcttcctgcccggctccggctaccatgatcacatcatcaataatttctgacttttcaaatgcttccagacagtaacagatgatgggttttccacacagctcgatatactgtttctggatagatgtccccattcttttcccctgccctgccgaaagtacgattgccacgcatctctttttcatttactttttcccgccttaattttgccttttttccctttttaacgctcgccaagcttcagattcggaactgcattcagatcccatccgcttctggttccattcatatattcataataagctgccacaccaatcatagccgcattatcggtacagaaaatcggagacggataatagaatttcacgcctcgtttttcacatgcttctttcattgccgcacgaagagcactgttcgatgctacgccgcctgcgatggcgaatttgtctactttatattcttctactgcatgcatagctttagcaaccagtacatcggtgactgctttctggaaagaagccgcgatatctgcctggttgtattcttcgcccttcatcttgcatccgttaatataattcaaaacggcggattttaatccactgaagctgaagtcatatggtgcgtcttctacatttgcacgtggaaatgcgatggaatccggattgccttcttttgcaactttatcaatcttcggtcctcccggatagccaagtccgattgcacgggccaccttgtcaaacgcttctcctgccgcatcatctctggttcttccgatgatatcgaattttccataatccttcacacgaaccagatgggtatgtcctccggatactaccagtgagaaaaatggtggttctaactctttatgttcaataaaattggctgcgatatgcccttcgatatgatgtactccgaccagcggtttacctgctgcatatgcgattgcctttgcttctgccacacctacgaggagtgcacctaccagtcccggtccgtaagttacaccgattgcgtcgatatcgtccagtgttacctctgcctctttcagtgcttcttcaatgacctgattaatcttttctatatgttttctggatgcaatctccggcacaacacctccatacaatgtatgcagggcaatctgtgaagaaatgacattggacagtacttctcttccattctttacaactgccgctgctgtctcatcacaggagctttcgattgccagtattaatacatcttttgtctcgctcatattttccctcctaatcttcaaataccagttctaccgagcgcttatcttttgctgcgattgaatttgggaatattgccttgacatcgtccatatattcctctggttttgtcagtgacgggctataatgtgtcagccacatttcttttacttctgcttcttttgcaagctgtgctgcttcatagaatgtcatatgcttatattctttggccttcttctgcttatccttttcgccatacattccttcacagatgaagagatcggaatgctttgcattctgcttaatagattccgtcggtctcgtgtctgtggtatacgtaagcttgattccctttcttgccggcccgagtaccatattcggtgtatatacgtgcctcttagtctctattgtttcacctttttgcaaaagtccccagtattcctgtgggatatttgacgctttcgccctttccacatcgaattttcctgcacggtcgatctccattgtataaccataacaggttacgttgtgattcacacgaaatgcttttaaccggtagccattcaattcgaatgtctgctcggtttccgtaagttccatatatttaatctggaacggcagctccggtgcgatcacgcgcagggcatttactacccgttccagcccttttggcccgattaatgtaagcggtttggtacggtctgcatttcccattgtaagaagcaggcccggaagtccgctgatatgatccccgtgataatgcgtaaagcagatcacgtcgatcggtttaaaactccagcctttttctttgattgcaatctgcgttccctctccgcagtcgatcaacaggctgcttccattatagcgcaccatcagggatgtaagccacctgtatggcaatggcatcatccctccggttcctaacaaacatacatctaacataattttcctctattcttcttccagtttaatcttaaaactgcccgtcagttcatcataacaggcttcacaaaggtcaaaatgatccatccggttatctttgtcagaaaaatatccccatcgcttgtccacgctcagcacatcttcctggggaaccccttctatcaccggaatcactctgccgcatttattacatacgatacttgtaacttcttttactttttttgtctgttcttcaaactggcgcataccgttcctcctgtaattccggcaccgtttttgccggtgctgttctgctgttacattgttctcttttcattactctctatctttttgttctctcggttacgcctatattatagctttccatctgtatgctgaccagtggaaagtgctgtaagaattaccattgtttcctatagactctttgacatcaaaatggcattttcctgtggattctcgtaatagtttttacggattccatcttctgtaaatccacatttctcataaaatcttctggcggcttcgttgccttctcttacttccaacatgattcttgttatctgctgttcctcacaaaacgccacaagttcctggaacatttgtccggcagccccttgtctgcgcatagaaggagctgttgcgatccttgcgatctcgccttcatctaatacgtaatagataatgagatagcctgcaattttctcctctgtctttgctgcaaatatcactgcattcttctgattccatgtctcttccagacttttcaaactccatgcatcggagaatatttcactttccaacgcagcaatatcctgaagatccgacagttctgccttacatatcttttctaacatgcctcaatgtctctgatcagttcttccaccacttccggctttgttgcccagcttgtacagaatctgaccgcactttctgcatccgataccttctcccagaattcaaacacatatttttcttttaatttctcaatatggctgtccggcaggatcgggaactgctgattcgtataggaatcgtaacgcaggccatatccttttttctgaaatgccttcttaagcttcattgccagttcatctgcatgtgcagatatcttaaaataaaggtcatctgtaaacagtgtatcaaactggacgccaagaagacggccctttgccagcattccgccattctgcttgatcatgtagcgaaaatccttctttaatgcctcattcgtgatcacaacagcttcaccaaataatgctcctaccttggttccaccgatatagaatacgtctgtatattttgcaagatctgtaagtgtaatatcattggtctttgccatcagtccatatccaagacgtgctccatcaaggaagagtaacatgtcatatttcttgcacacttcatacagatccattaattctttctttgtatacagcgttccattctctgtagggtgggaaatatataccattcccggctgcaccatatgctcctgacttccatctgtaaaatgagcatgacacatttcgtctacctgtacggcactgatctttccgtctccacttggaagcggcagtactttatgtccggttgcttcaattgctccggtctcatgcacattaatgtgtccgcttactgctgcaactgcaccctgataaggacggagtgccgcactgatcacagttgtattggtctgtgttccgcctaccaggaaatgcacatctgcatcctgacattcacacagatccttaatcttctgtcttgcactgtcgcagtatggatccagtccatatccgtcggtctgttccatatttgtctctaccatccgctgcataattgcaggatgggcaccttctgtataatcacactgaaatctatacatttcccagtctctccttccgttctctttctgcctgagacacgcggagataatccggttcatgctccattgcagtttcgatctttccttctttataatactgcattcccagtgttcctacggatgcagctctctgccggttcatatttgccggcgcaaatgtaacagcttctcccggcaggatctcttctttgatctttgtcttgtgcacaggaaccccgtcgccaaggaaggttactcttcttccttcttttaaatattttttcagcttttctcccagttcttctatcggaactgccatctggtcttccagtatgtgaagcttctgtccgtcaaattcatagattcccgcatacacctgcccgcgtcttgcatccatgatcggacatacaacatctgcgattccgcacagattgtaagcaagtccctccagtgtcggaatatggatcagcggtttctcaagcgcaagtccaagtcccttggccgttgcggaaccgatacgaagtcccgtaaatgatcccggccccccggctaccgctatcgcatctacggtatgcagatccagttctgtcatcttcacgatctcgtccagcatcggaagtaatgtctgtgaatgtgtcttcttataattgactgtatattcggcaatgacctggtcatccactgccccgtcttctactacagctacactggcgaccagtcctgagctgtctaatgctaatattcgcatattgtaatcctccggtaatcgaatcctttttccagatccttttctatcttaatctctgtgtaatgttccggtaatatctcttcgatcagattagcccactcgatcaggctgacgccctctccgtaaatataatcttcatagccaatctcatccatctcttccacatcaccgattcggtacacatcaaaatgataaaagggaagtcttccttcatcatagatctgcacaatggtaaatgtaggactgctgaccggttcatctatccccagtcctttggcaagacctttggtaaatatcgtcttcccgacacccagatctcccaccaatgtatacacctgtcctgcacaggctttttcacccagactaaatcccagatcccaagtctctttctcactgtttgtctctattatcataagctctccctttccatttttgaaatcactgtattcagtatctttaagtataacacatctttttttcttctgctactcatgatatactttctgataacagcttaaatatattaatttttatcaataatggaggaaaacgtatgaaattcacattttatcacaataacattaacgttgctgatcttgacaagtctatcgaattctacaagaaagcacttggacttaagattacaaaagaaacagaagctgccgacggaagcttcaagctggtattcatgggtgatgataccaccccgcacaaattagagctcacatggctgcgcgatatggacagaccttatgatctcggagacaatgagattcatctggcaatgcagacagatgatatggacgcggcactggcattccataaagagatgaattgcgtctgttttgagaatccggagatgggtatttatttcattaatgatccggatgggtattgggtggagatttgtccggttgaataagttttctatttagttcatcatcgtggcctctcggtcctttagaaagcgttggtattctgtttttggctaagattccacgatgaagaagttgtaagggcgccagaattttctaaaagcacccggaatatgagtcaaactcgccatccggctcaaacagtgactcatattccaggtaacgaaaattttgacgccctaacaacttctaacatcgctccatatacgcctaaaacagaataccaacgctttctaaagtcgtgactggccaatgataatgaattcaatagagggactgtaacttttgtgtgtaaccgggaagttgtggtgaaggcccttggttttctggcttttttgttgccatatgttcgtaagaacctgttgcttgcaggttatgttggtaacgggttttgtaagcaaactttcggcatcacaacggttacggttcctctgttttattttttatggcatgcgaaaacgtgactgaaaaaaagtatagcagggattgctgtgcatatgaaatcatggttggaacttcttaagtaaaaaaatcggccgttagccggtcaaaaatcatttgtctgagcgatcagcgagttatgatttttgaccggctgcttttaggtcgatttttttgctttagatgttccccatgatcgaatcagcacagcaatccctgctatacttttttcaggcccggggtaagccaccataataaatgaaacacccctacgcattcatcttcaatatcggactgatttttttataaaccagaaacacgatcaaagataccagtatacctttcagcagattgaatggtccgactgccagtatcacgaaagtcttaaggtctgtgatatgtttgtttacggcagttcccattccaaccaggccgtcgatcggcataccgaatgctttggcatatgccggtagtaatacgaaggcattcaggaaacatccgactactgtcatgaatacggttcccgctgccattccggctactgctccgattctggtatgtttcttatggtagatcaatgcggccggcacaaccagtgaacagccaatcaggaagtttgcaatttctccgactcccgctgtcatagttccgttgattgcaaaattcagtaagatcttgataagttctattgccgctccggcgagtggtcccattgcaaaacttccgatcagaatcggtacttcgctgaaatctatctcatagaaggacggagcgaacggaagcggaatttcgaacaacatcaatactgttgcgattgccgataacataccaatctgtgccattgtcctgattttgtttctgttcttttcattttgtcttgtcattacttttgtactcatctttctttctcctttaaaccgaattatattctaaaggaagaaacttcttaattttgaaccatacaatattcacatagcaagcaaaaaccccgccacccaaagggcaacggggcaatcatatcattctgataatcctgtaaatatcgtatcatccttctctcatccagactttactgtcggttccggaatctcaccagatcggctgatcatcacattgataacatctgttcagatatctctgaccagaaattcttcaaatgaccagttcgcggactttaccgccggttgggaattacaccctgccccgaagaatcttctttcacacgatattataatacggaatgctgctctgcgcaactattattttgtactcatctcgcggatcagttttctgattggaagtacgaatgtcggagatacggacagttcatcgattcccatcttaaggaatgtctctgtcagagtcatatctgcgccaagctctccacagataccaacccagcatcctgccttgtgtccgttctcgatcgtttgctggatcatgcggagcactgccggatgatgtgcatcgtaaatgttgtcaagcttactgttctgtctgtcaatcgccagtgtatactgggtcaggtcatttgttccgatactgaagaagtctacctcttttgccagaagatcactgatcatcactgctgccggtgtctcgatcatgataccctgttcaacttcaccatactcgattcctttttctgtcagttctgccttgatagactctacgatcttcttgatctcttttacttcatctacagagatgatcatcgggtacataattcctatgttaccatatgcgcttgcacggagaagtgcgcgaagctgtgtacggaagatatctcttctgtccagacagatacggatcgcacggtatcccatagccgggttctcttcatggtcaaggttgaagtaatctacctgcttgtctgcaccgatatccagtgtacgcacgattactttctttcctgccatgttctctgcaaccgtcttgtatgcctggaactgtgcttcttcatccggatagttatctgcttccagatataagaactcacttctgaacagaccgattccggctgcatcattggcaagtacgcttgcaacgtcttttacgccaccgatatttgcatataatttgatgtgttttccatctacagttacgtcttcttttccctttaattcctgaagaagttctcttgctttgatgtcttcttctttcttttcctgcattttctttaagatatcttcgtccggatcaatgtagaatgttcctgtgtagccgtctacgactgccatctttccattccattcttctttgatatctacttcgatcaatgccggaatgttcatggttcttgcaaggattgcagtatgtgagtttgcagatccaagtctggttacgaatgcaagaagtttctctttgtccatctggacagtctcactcggtgcaaggtcttctgccacaacgatcactggttcatcaccgatagctccgccgctttcgttgccacttaagatatttaccatacgttcggaaatatcttttacatctgcagctcttgctttgaaataatcgtcttccatctccacaaacatttttgcaaagttatcgcctgttgtagcaacggcaaattcagcatttacctgctgtgtctcgatgatatttacaacagaatcgatatagtcatcatcctccagcatcatctggtgaacttcaaatacagctgcgtttgcttcgccgacttcttttaacgctttttcatacagtccctgtaactgctctgctgcctttgcacgtgcatcctcatatcgtttgatctgctctgcagtatcttctattttcacacgttttacaggttgttctcccttctggtagaacaatatctttccaattgcaattcccttaaatattgatttgccagtatacatctccataaatgatacctcatccttccttaaatctttgtaaatattctaactcacaatgcctgcaaagtctagtttttcgtatggttcaattcgtcgtaacgcagcttttccattgtaaatcctcgtcctcttacctcattgatctgcgtgatcgtgataaatgctttcggatcaatctcctgaattgcctcttttacagaatacagctttctgctgtgtatgacacataatacgccctgctgcttctgttctccataaccagtctcgatgtctaccattgtcactccggcatcaatatccgttaagactttctgacggatttctctgtatttgtccgaaattataaataactggatctgtgactttccaagaagcatcacccggttcagtacaaccgtacttaaaaataaattcagaataccatacagtatctgttccgaatctgaaaacagcatctgaagtcccagcaccgaaaaatctacgatatacaagaataccgctaccgggacatggaaccatttatgtaacacaagtgccagtatatcggttccaccggtagatgcacctactcttaccaccaatccgataccgattccaagaaggacccctccatataatgccgcaagcatagcattattctccgtcactttgtctattcccggaatggactgtgccatcgacaggaatattggataaataaaagaactgatgatcgttgtcaatgcaaacttctttcccagaaatactgcaccgagaacgaacagcaccgcattgattgccaaaatgatcagcgacaggttcaccggaaaataatggctgatcgtaagaccgataccggttgcacctcccatgatgatcccatttggcacggtaaacgcagccacagcaaatgacagtacaagattaccgaccagcacacccagaatagttttgattgtttttccccaactttttttcatatgtcccatcctctctccgtattttattttgcgattatacatataacccgttacagacagttatccccatataactgcctgtaaactcatgttttccacatttttatattaataatgtggattctctttcttctttttccagattatgaaattcctttcatcgtaagctggattctcttcttcttaagatccacgctcatcacttttacatccacgatatcgccaacacttaccacttccagcggatgcttaatgaatttcttatccgtaatctcggaaatgtgtaccagtccgtcctggtgcactccgatatctacaaacacaccaaagtcaatgacatttcttacggttcctttaaggatcatgccttcttttaagtctttcatatctaagacatctgttcttaagatcggtttcggcatctcatcacgcgggtcacgtcccggtttttccagttctttcacaatatcccggagggtgatctctccgatctccagttcttttgcaagtcttgcatagtctttgattgtaagagaaagtccggtaagctttcctccgctgatgtcttccagtgaaaatccctgtttcttcagaagtttttctgcagcttcataagactccggatgtacactggttccgtctaacggattcgtaccgttctgtattctcatgaatccggcacattgttcgaacgcctttggtccaagctttgcaaccttcagaagctgttttctgtctgtgaatcttccgttttcttctctgtatgccacaatgttcttagcaatcgcaccggaaatacctgaaatataagaaagtaacggtgcggatgctgtattcaggtcaactccgactttatttacacaatcttcgacaactccggataaggcttcgcttaatttcttctggttcatatcatgctgatactgtccgacaccaatggatttcggatcaatctttacaagctctgccagcggatcctgcagtcttcttgcaatagacgtcgcacttctctgtcccacatcaaatttcggaaattcttctgatgcgagcttacttgcagaatacacggaagctcctgcttcatttacgattacatactgcactttctgcgggatctcttttaacagttctacaatgaactgctcagactctctggatgcagtaccatttcctacggagatcagtgtaatgttatattttgcaataatcttcttcagcaggtctttggacgcctggattttcttcggtgtcgtcggcgctgtcgggtagatcactgtcgttccgatcactttaccggtcggatctacaactgcaagcttacatccggtacggaatgcaggatcccagccaagtacagtctgtcctacaatcggaggctgcatcagaagctggtgcaggttcttcttaaatacgctgattgccccgtcttctgccttctctgtcaggtcgcttcggatctcacgctcgattgccggtgcgatcagacgcttatagctgtcttctgctacttcttttaaaatcggtgtggtatgcgggttatcactgtggatcatcttcttttccagatatcttaagatgtcatcctgcggtgcttcgatctttactgtaaggaacttttctttctccccgcggttcagtgcaagcactctgtggcctgcaagctttgtcaccggctcttcaaaatcatagtacatctcgtataccgactctgctttttcgtcttttgcctgtgaaattacttttccgtgctgtacggttgctttacggatccagcttctgtaatctgcctcatccgataccgattcggcgatgatatcttttgctccgtcaattgcttcttttacggattttacttctttctccggattcacatattcttctgcatacacttctatcggtttctccgctttctgaagtgtgataagtgctgcaagcggttccagtcccttctcttttgcaatcatggcacgtgtccggcgtttcggccggtatgggcggtaaagatcttctaccactaccattgtctctgctgccaggatctgctttttcagttcttcggtaagctttccctgttcttcgatacttgccagaacctgttctttcttttcttccagattacgcaggtacatcagtctttcatgcagtgtccgcagttgtgcatcgtccaatgttcctgtaacttcttttctatatcttgcgataaacggaatcgtattgccttcatcaattaattttaccgcagcatctacctgccatctcttgacaccaagttctccggtaatcacctgattaatatccatatgttttgtctgtccctttcttgctgtatttcgaagatttttctcttctttattacgcggataattataactgaattcacttccgtatgcaatgccgccggcaatacagagttcactctgttttcttgaaaatacattttctctatgttatactgaaactgcttgaacttattagaaaatataaatactcaaaggggcttttacttatgaatcaggaaacacagggactctcaaaacaacaaatcaaatccagagaaacacgcgccaagatcttccaagcagccaaacgcattctgcaaaagcagggctatgaacaactgtcaatcaaaaatatctgcgaagaagcaggcgtttccaacggaagtttttatcaccattttaagacgaaagatgatcttctttcttattatatagaagaacagccaagtatggatccggatcttcttgaacttccgtccagtgctgctgagacaaaagaagcaatcatctcagtttatttaaattatgttcactactgcgaagagctcggagtggaattcatggccaattattatacacctaagaatcagtccctgaatcctttgatccgtacagaaagaccatacccgatcgttaccgttcatgattatctgaagcgtgtgatcgaatccggaatcatttccccatcggcagaccttgaggatattacaactgacatccgtatgatcgtaatcggaaatgtattcgaatggtgcttaaaaagcggcgatgctgattttgaaggtaatatgcgtcggtcccttactacttatctgaacggattattctaacaaatcattacatcatatagatactttatcgaatttcaaaaacttacaaaggatgaatgcgatatgtacacatttattgccaatcctaatgccagatccggcagagggattcttctctggaaacagattgagaagatcttacaggaaaaagaaattgaatataaagttttatttactaaataccagcatcatgctaccagactggttcatgatcttacctccgatagcgcatcccatacgatcgttgtactgggaggcgatggtactttgaatgaagtgatcgacggaatcgtatatctcgataaggtaacactcggatatattccgcttggatccggcaatgactttgccagaggccttggtcttccaacggatattcacggtgccctggagcagattcttgccccaacgcattacaccgccatgaatgtaggtgtacttgattacgagaataagcaccgaagattcgctgtaagtaccggaattggcttcgatgctgcagtctgtcatcaggtgatggtcacaccgcttaaggctttcctcaaccggctgaagctcggaaagcttacatatcttggtgttgcccttcataaactgttcacattaaaaccagtcactatgacggtcacaaccgaaaatggtgagacaaaaacatatgaaaaagtatatttcacagctgttatgaatctgaaatatgaaggtggcggttttaacttctgtcctgctgccagtggtacagatgacaggttagatatcattaccgtagcagaattaccgagacttaaagttctttgtctgctgccaacggccttcaaaggatggcacacacgtttccatggaatccatcttgatacctgcacagaagtgactgtcataagcgattacccactgcctgtacatacagacggcgagcccgtctttttacaatctgagatccacgtacatctggagaaagaaaagttacgtattattacaccttgttaatcatattgttcacgtggaggttcttttatgcgtttactgattaccggaattattgtatttcttatattattttacttttatctgatctggccgagactgtctaggaaacgacagatccgtccatttcttcacacgatgttcgcccatcgtggatatcattgtattgaaaaagggattcccgaaaattccataccttctttccgtgccgctatctcccatggatatgggatcgaactggatgtccatctgacaagcgacgaaaaacttgtcgtattccatgatgacgacctgtctcgtatctgtggacgaccggaaaccattgaatcactccctttaaaagaattacaaagctgccggttacagaatacgaatgagactatcccacttttcaccgatgtactatccctggtgggcggccaggttccgcttctgatcgaactgaagattccaaagtcttctcttggcatctgtgaaaagacctgggagattcttaaaaattataacggaccttatatggtacagtctttcaacacacttggtatctggtggttccgccgtcatgtaccccatgtcttaagaggtcagctttcttccaacctgactgccgaccatcttccggagccatggatcctgacctttgttgtaaagcatctgcttggtaatgtactcggacggccggattttatttcgtataagcttgcagaccttccgatgtttgaagtctggtttttaaagtacattctgcatcttccggttgcagtgtggactctgcggacacctgatgctttaaaaaagggaaaacggcattatgatatgcagatattcgagaaaaagaacacttactattaactttgtaaaaaatgttaatattccatgaactttattgttgattcaattttttcatgttataatgcgctttgaaacgagataagataataacaaaggctttgaaaaaggggtagttcatatgaaagccattgataaagcaaagagttttttgaagaagtaccgtcatgcatgggtattatcatactttctgatctatatgccatggtttgtttatctggagaagcgcacgaatgtacgtcattacatgatacattccccaatcgacaatcatattccgtttattgaatattttatcgtgccgtatttagtgtggtttgtattcattgccgtaacggtagcttatttccttattaaggataaatggggattttacagactatgtgcttttttattttcaggtatgacgattttcctgatcatatgcacggttttcccaaatgcattaaatttgagaccaactgtatttccacgcgataatgtatttacagatatggtaaaagtcctgtacaagacagacacaccgacgaacgtgcttcctagtatccacgtatttaattccatcggtgtcagtattgctatttcacacagtaatgatcttaaaaagcacagatggatccagatcagtgcctatattctggcagtgctcattatcctgtctacaatgttcttaaaacagcattccgtgacggacgtgattgcagctgttacgatggcatgtattatttatccattcgtgtatgtgacagcggataaaaaagcgccgaagctttctcagcagccgacgtaacatgaatatagaaatgactatctattggcaattttttgtatattatgctatgaaaagaaagatgcaggtaactgttatataactgacagttacctgcatctttttatttttgttccgttttctttaacagacagcgctttttgaaaaatgcgatgccgtaaccgagcaagcagtgtttccagctttttcgtaatattacttccggcatactcgataaaagaacggattaccgcatcgtcacttgtattcttccaataacttgccggtgctgcttccggattttgctgcagatcccgcatataattcatgacatcccacgggcaatatacatcgaagcgtccaaaatgataaccataataccatcttttcacttcttctgcctttccagacacatttgcgtcggtcagaatctgatctacttcttcctatgtaaatccaaaatattcattgaatctggaatccgtaatattatcagacacaaaattattcgttcctgtgaagatactttcttttgcaatcttcagacaacctgttatcaccgcaaaccgaagtgccgtattatctttcaatgccgtactcatagtatgcagggactgtcctacctgaatctttcccgcacttccactttttaactctttaaaaagattcatccatgcactgcacaatgcttcatcgtagataatttcaagaccatcgaataacctcctgttatcggaacgtatatcaaaaaatgggcaagcatactcatccccattgtttttccaaagcgtctcggacgggtgatcagtgtaacttccgcagactctctttttagcagttctttgatcagtccgcttttatctatgtagtagtagtcattttcccggatttttttgaagtcggatattcctaccgggaaattgagttgattgttcactggctccactgcaccattttttgttgatattctgctgtctgcatcagaacatcttcctccggatttgtcatatatcccatttcaacaatcgttaccggcacctgactccagttatttccgctcattgtatctgtttcccatacatattctttattgcaaccagtaacttcacagtatttatcaagaattgcttctgataacgctttactttcgtcatcattcaggaaagtagtatctgcaatgcattttctgaatttttccaattattggccgattcggaatacataactccagagaaccagacacgcacacttattcagaaatacatccagcaattgaaacaactgacatttggtattactccctagaatttttttatttcttcttgtggtttttttattttctctctgatctgcaaaacctagcactggcagtttctttcgaacacatgacgatataaattaaggaggtgtacatccaaaacatacacctccttatctatttactccgaattcctgcatactccgtatacttctcaaatgccgacggtatcgaatattctttttttatctgctccggatgaatgaacagaaaaccttcctcattcgtcttctccagttcatctacgatcacttcataacctgtcatatgccattcaatatgactgaagatatgtttcgcctccggaagttcctgtatgcggaccggcatcagaccaatcttcttactgtattccgtaacttcagccattgaaaattttccttccagattcgggaattcatataatccggccagcaatccttttgccggacgttttcggattgcaatctgtttaccgtctttgaagatcagtacagttctttcttcgatctttctggcctttgctttcttctttaccggtatctccgctgtcagattctctgcatgtgcaatacaatactcttttaccggacattgttcacatttcggtcccccgttcggaacacacacaattgcccccagttcaatcagtccttggttaaaatcgctggcggcatctgtaggtatcacctgttccagtgcactttctatctttttgcggacgctttgtttcatgatatcttcatagctacccgtaattctggaaatcaccctgagcacattgccatccactgccggtttcgggattccataggcaaatgcactaatcgcccccgccgtgtaattgccaattcctttcaattgtaatatttcttcataagtatccggaaaccttcccgcatgatcaaccatgatctgctgtgccgctttctgcatatttcgtacacgattataatatcctaatccttcccacagtttcagcagtttgtcttcttctgcttctgcaagatctttcactgtcggaagtgcttttaagaaccggtcataatatccttttactgcttctacccgtgtctgctgcagcatgatctcggatacccataccctgtatgcatccggattatggcgccacggcagatcccgtttattctcccgataccagttcaccaacggctttacaatatttctaagctctgcctctgaggacatcttcggttcctgcagttctctgtctttttttgattttgcttcttcgactttcacttctgtttttttcactactttatgttccatctgtttctccattgtccatttgggaaacaagtgccttttctgttgtttcctcacttattttattttcgaacatatggtttattataacttatctctctatacaacgtcaaagcccttttcctggaaatgtcgtcttggggaagacactttcaggaaaagggctcttagaagggaatgtggctgatccttgccactaacaatattatcgtttaaatttattatatccccgttttctttaaattaccaattggttattctcatgtacttataggcattttctatatgtcatattctattgaatcttttcattttttctattattataggtattttctatttcattttatcattataggaaaaaccaattggaaaattcatttagaaaagcctatactattcatagaaaataaatatgaatatttaggaggtattcggtatgtcaattacagcggaaacagcgaaagctcatgctaacgatcctgccgtattatgttgtagagcagaaggcggaattacaattgaaccagcaaacttagaggatccggcaatcttcgatgaattagtagattcaggtcttttaaatcttgatggatgtctgaagattggacaggttctgggagcaaaattaacaaagaccagtgattctctctgtccactgacagcagacaatgtagacggattcaagactgatgatgaattagcagcagaagaggctcctgccaaagaggaagctcctgctgaggctgcacctgctgcaagcgttcagggtgctgttactacaattaagcatggtaaagtagtcatctctatcaaagaaggaaaagatatttatctggaacttcctatctagtttgaagagaacatacaaaattttcttataaggacaaaatggcagatatcccccaaatgatatctgccatttttattcttaatactacatattctatttttctgcttctgctgcttcttcaacatcttccgtccagttcattcttccataacgcaatgtcaccgcatggatctctttctgtaatttcacagataactggttcttgcggattctccacttccagtttgttccaacagttgacggtgtattcatacggcacttgttatcaaggcccagataatcttgcatcgggatcacgcaccattttgctgcgcttctcatgatcagactgatcagaggcttattcagttccgcctccggtgtataggtatcacagagatattcgcgggtcagcttctgctcatccttactgatgcttccccaccagccggcaagtgtctcattgtcgtgagttcctgtgtaagcaacactgttcaccggataattgtgcggtagatagtcgttcgcagatccggaatctctcgaatcaaatgcaaattccagcaccttcatgcctgggaatccgctgtctcttaccagatcacgtacgctgtccgtaacatatccaaggtcttctgcgataaccggtttttcacccagtgcttctcgtactttccagaacagatccatgccaggccccttttcccagtgtccgtctactgccgtctctgccccgtatggaatagagaaatactcatcgaatccacggaaatgatcgattcttaccacatcatacaggcggaatacataagccagacgagatatccaccactgatagccggtttccttatgatatccccagcggtacagtggatttccccataactgtccggttgcagagaatccgtccggcgggcatccggctacggcaaccggtacattttcctcatccagctggaataattccggatgtgcccaggtatctgcgctgtccattgccacatagattgggatatcgccgatgatctgaattccttttttattggcatatgctttcaactgcatccactgttcatagaacttgaattgcatatactgctggaattcaatatcaaaatacaactcttcacggtaataatccatggcaggtccccagcgcagcttgatatcatctgcccacaacttccattccacaccgtcaaatctgtctttaactgccataaataatgcataatctgacagccaccagctgttctcttctacgaacttctgatattctgcattctcatgtatcttacttctttcgtaagcttttcgaagaagcgggtaacgcccttcgtaaatctttttataatcaatactcccttttgcttttccccagtctacggcctcacattccgcctttgtcagaacaccttcttccaccagtgcctccagactgatgaaatatggatttcccgcgaatgtagaaaatgactgatacggggaatccccgtaacttgtaggaccaagtggcaggatctgccagtaactctgacctgctttcttcagccagtctacaaattcatatgcactttttgagaaacagccgattccatattcagatggaaggctgctgatcggcatgagtatgcctgctgctctttcgctcatctttctttccctcttcttttttctatttattttgatttcctttttgctttatatttttgcagatgtcttattataaaatgatccattataccgttatcataactccataatgatccgatacaaccggtgcattctttccgttacagataacatttgatgagcggacatctgccggaataattgccacttcgtctcctaataccttatctgaaaacaccggatccggtacttcacttaaaggcactgcctttccggttaacagcgcaagaattacttctggaacctttttactctcattctcgttcacaacgaaacctcctcatgtttttctcatctgcacttcttttgcatttgttttgcgcaaccgcttgcattaattatattcagtttttgcattgttttcaattagtattttactttttgctctgatttctactttttgtataattttgcattattgtttttgtgcactttccctatgttttcccatgcgtgcgtttgcgcaatatttcatgcaaatgcattgcaatgttgttttctttgctgtaaaataaaaatatatgaaaaatctatgatatcggaacgtataaaacaagaatatcagaactacaaaacaaacggaggttatctttatggcagtaacgatcaaggacgtggctgcgctggcaggagtctctccttccaccgtgtccagaacctgtaaaaataatccatccatcagcgaagaaacgaaagaacgtgtcagaaaggctatggcggaactggggtatgagccgaatttccaggcaagcaatcttgcctctcagaattcgcgtaccattggcatcattctccccgcttccgcaaaagaagtctatgagaactccttctatctggaagcaatccagggaatcagccattattgtaatggcagacagtatatgacaacaattgtaaccgggcaggatgaagcagagatccttgacgccgttcgctctatgtccagaagtggcaaagtagacggtttcatcatactgtattccaagaaagatgatcccgtcatcgattacctttttaacgaaggtcttttatatattctgattggaaaagcaacacagtataccaaccagactatctatattgataatgataacctgcttgccggaagagaagcggctgaatatctttatcagcttggacaccgccggattgcctaccttggttccgacagctccctgatgttctctgccgatcgcaaagccggttaccagcttgcgcttgcaagccaccagctcccggttcgtccggaatattgcgtggaagtaaagaatgtatcagagaataacgaagaagccatacgcgggctccttatgcagaaagaccgcccgacagcaatcctggtcagcgacgatatcctcgccgtctctttagaaagagtctgtctggaaaaccatcttgcaatcccggaagatttgtcgatcatctccttcaataactctttgttcgcaagactgacctcaccacagttaacatcaatcgacatcggagcaggccaactcggaagtgaagccgcctcccagatcatcaaccacatagaaaatccaaatctccttgcaaccaagatcattgttcctcaccacctgatcgaacgggacagctgttgtaaaatataacctgtaagagattttgttataacatcataaaacacaaaaaggaaatatataatgttataaggttttctgcatagcaaacgaaaacatttacattatatatttccttttcatttttcattataaaatcttagataaaaattccttaagacgaggatcttttggattctcaaaaaattcctccggttttgcctgttcttttatctgtcccgcatctataaagataactctggaaccaacttccttggcaaatcccatctcgtgtgttaccacaaccatcgtcatgccttctcttgcaagctgtttcatcagctccagaacttctcctaccatctccggatcgagtgccgatgtcggctcgtcaaacaggatcacatccggatccattgccagcgaacggacaattgcaattctctgcttctgaccgccggataactgcgatggatacgaatctgccttttcggcaagtcctactcgttccagaagttccattgctcttttatctgcctcttccttactctttccaagaagcttgatcggagcaagtgtgatattttccttgatcgtcttatgtgggaataaattaaagtgctggaacaccattcccatcttctgacggtgcttgttaatatccacatgtttgtctgtaatatccacaccttcaaaatagatatgtccctgatccggaacctcaagaagattcagagaacgcaggaatgttgacttaccggaaccggatggtcctacaataacgaccacttctcctctgtgaatctcctcgtcaatcccattcagcgcatggaaatccccgtatattttatgcagaccttctactttgatcagtacatcatctttcttagtggtcactgtttctcaacctcctctccagtaagctgacaagcttggtaaatatcattaccattgccagatagatcagtgcaacggcgatcaacggcataaatgcatcatatgtacggcttcgaatgatatccccgcctttagtcaggtcctgtaatgcgatataaccggatacagaagtttcctttaacagagagataaattcattacaaagtgtcgggagtacattcttaaatgcctgtggcataacaatatacatcatcgtctgtgcatagttaaatccaaggcttcgccctgcttcaaactgtccgttatcgatagacataataccagaacggaatatctcagcaacatatgcacccgagttaataccaaatgctacgatcgcaacgacaaccttactgatatcaacacttccaaatataataaagtaaatgatcatcagctgtacaactactggtgttccacggatcaccgtcagataaactttacagattgcattcagaatcttcaatttgccggtcttatcatgtgttgtacggacaattgcgatcaagaatccaagtactacaccaatcaatactgcaaatacagtaaccagcaaagtgatcttcagaccatctgtaatatatctccagcggttatcatctataaaattcgaaataaaactacttttcaattcctgcatattctcatcctactcttctggattatttcttaacgatgatcatctgttttcctgtgtaataggaatcagaaaaatctacctgtttctctcttccctttgtaacagtcataccagccgcaccaaaatctgcttttccgctgtcaactgctgcaataattgagtcaaattccatatcatttacagtaagttccataccgagcttatctgcgattgcctgtgcaaagtctacatcaacaccaacaatcttgttatcttcataatattcatatggctcaaatgctgcatttgttgccatcacaagtttaccattagaatgatcgacatctgccggagactcatatcctttttcttctgttccgtcgatataatatccaacgatcttgtcaaatgttccgtcttctttcagttccttgattgctgcgttgaatttgtcttccagctctgtattgccctttttaaagcacattgcataatcttcttctacataaggtgtctcaagaatcttcagtccgtcatttgcatctacaaatgcttttgcaggctcgttatcaataacaactgcatcgatctttccttttaccagtgcctgtactgcatctgcacctttattaaaacgctctacatgatcatcaccgaaatcatcagaacagtagatatcgcctgttgtacctgtctgaacaccaatctttgcatccttaagatcatctgcactttcaattttcttttcttcttttttagatccgcatgctgccatagaacatacacatgcaccaatcagcattacactgataagtttctttaatttcataatcttttcctccattcttttgacaaactgtataaaaatacatatatacttaatatattatcatgttttaatcaaaaaacaagtggataattccacatattcgcaaaacatccacccattttctttatacatttctatgcaattacagtctgaataatagtccatacaatgatcagaccgcccaaaacgatacgataatatccaaatactttaaaatcatgctgtttgatatatcccataaggaacttgatcgcaataaccgataatccaaaagacacgatacatccaagcatcagaagaccaaattctgcgcctgtaaaatggaaaccgaatttgatcagtttcaaaagactggcaccaaacattgccggaattgccaggaaaaatgtaaattctgcagccacttctcttgatactccgatcagcagtgctccgacaatcgtagctcctgatcttgatgttcccggtatcagcgcaagcatctggaagaaaccgatccataataacatctgtacacttaactgggagatccttgtcacagaaggttttttgcctgcattatgattttctacaacgataaataagataccatatacgatcagcatcactgctaccggaatcggtttatagaagatctcatccagaatatcattgaacagaactcctacgattcctgcaggtaccgatgcgatcagtaccttgatccacatctgccaggtcagcatcttctgcttgtggctctttcttggtgaaaacgggttcaacttatgaaaatacagtactacaactgccatgatcgcacctaactggataaccacatcaaacatctccataaatgcatcactcatacttggtttcagcacatttccaaccagaatcagatgtccggtactgctgacaggaagccactctgtgattccctctacaattcctaaaattataaccttgataatatctaacatgttgcgctcctttccttaatccagcacatatttttctataaatttcgcaacgccctcttcgtcattggataatgtcacatactctgctgcttcttttacggaaggaatggcattttccattgccacacccgttcctacttctttcagcatcttcagatcattgttgccatctccgaacgccatgatttcttctcttggaattccaagaagctttccaagttcgatcattgcttttcccttgttcactcctgctgcattaatctccagattcatcggaagcgctcccgtgatctcaattcccggaacatcttcgatctcttttctggccgcatcacgatcttccacagaagtaaataacgcctggatcttatctacaggaagtttcgtctcatcaaatttgactctcacatcatccactgccacacgtgtagacataatataattcgccattgccggaacactcagatatttaccaatatgttccagtgcttcccgcgaggcatagcctacgccatcaaaataaatctcccgaaatgtatcataatgttcgaatacgtccatcattacttctgcaatatcatgtggaagcagttcctctacaattgcttcattcttctcaagatctataactcttccgccgttcgcagtaaccgcataacgtatgcccgggaattccagcagttcctttggcactcccgtaataggtcttcccgtcgccggcatcacaataattccctgttcaatcgctcttttcaacacatctttcgtatattgtgtcaactctttgtcagattttaaaagtgttccatccagatccattccaatcattctggttttaattttcatatgtaattaattcctttccttctcttaaaaacataagaagtttcttactgatcttattctctccctgttcatatgccttttctccgtgatcgatcattttttcaacgatatctttatttccggccggagcaaacaacactgtatcttttctcggaatcatgatgatcagatcatccttcaacttgtctgcgcagacctgccagatatgcttaaagcacacggaacttgcctcatgatgtccgtctgctacgatcccatatcccccataccaggtattcgcaattacaaattctacatctctgttcagattttcacaagctttatgatacagttttatgatatcacattcaggcggaagcatgttatcctttaagatctcatatatatcttcccctcttttaattgcaaacactacgttcagatccccaaggaacccaattacaggtgcatcttcttccgaaaaatgctttccattcaaagcctgggaatccgtaagctctgcttttatccacggatatatctgctcactgatattttccaatttataattttcttcttcgtattttttcatattatatatattcctctcttattcagacattctacctatttattttatacataattctttcctctgtaaaccttttccgaattagtttacataaagtttaatatatctttaacctgccaaaagaaacctaaaatttgctttataatgaattttgttgtataatagataagcattcgcgaaaagggaaaggatatgtttatgataagtatgaaaaagaaacgagcattacgatcggctttggcaattaccatctgcaccgtaacaattgcttctgttagtactccggtatattcagcaccttcgacagatgaattggaaaataccacctctgatctcaaaggtgagttaaacgatttaaacagccagttatcttctttaagtaaagagctggacactgcttccagtcaggtagaggatctggctgccaaagtagaaaaatcaaaactggatctagcttctgcccagcttgatgaggaagctcagtatgattccatgaaagatcgtatcaaattcatgtatgaaggcggcggagcatctctggttcagattctgctcacttccgaaaatatgggagattttctgaataaagctgaatatgttgcaactatcagtaagtatgaccgctctatgctggaagaattacagcaggttcgtgctaatgtagaaaagaaacagaaagatctggaagaacagcaaagcaaactttccggacttcaggaaacattgacaagcaaacgtgatgaactgaattcaaagatttcatccacttccggagaactggcaaattatcaggcacagttggatcgtgccaaagctgccgaggaagcattaaagcttgcacagaatgataaaatatctggctctgtaaaatcagaagcctcaaaaccaagtaactcaaccaatactacgaataacgcgaataaaacaaattcaacaacaaacggttcgactaatcaaaataaaaataacaccactaataataccggcaaccatactaccaacacaggcaacaacaccaatgtatctacaacggatgtcgcattattagcggcaatccttcaatgtgaagcaggtagttatgatggaatgcttgctgttgcaactgttatcatgaaccgcgtagcaagcccggcttatccgaatactctgcgtgctgttatataccagtcaggacaattcgctccaacctggaacggttcattgaataaagtactgagtaaaggtgcttcatccaccgcttattctgtagctcgggctgcacttggtggtgcaagacattctgcagttatcaattgtctgcagttcagatccgcgtcaaccggtgtatccggaatcaacattggtggaaatgtatttttctaattttatttagtagctgacattgtctcctgcatactatggtataaaaaataagcctcattttgaggcttattttttataccatagtacacggtagaaattagcggcaacacctttcctgtattaatatcatctattcatactccataacatcgatccatttcatcaagaagtctttttccagacggatatctttcccaagctctgcagcagctacgattggcagccattgttctacatactgtcttgctgtgtcactcttcttgcagaataacttaagataaagatctgcactttcctgatcatgtaatgcaaataacagatatgtcattgcagcatctgcacttgcatttccctgtgaagcatgtgcccagtcgatcactgtcatctttccgttcttttcaacaatcacattactcgggttaaaatcaccgtgacacaatttcgtatgcttcggcattccttccaatctggtcaaaagctcataacgttctgttgcatccaaatctttcagacttcttatctcatctgccagtttgtcttttaatttcggtaatgttgtggccgttttgctctgtactttaagctgaagatctacaaaatctgacatgtatttttcaagattggcacggtcaactttcatcatctcttccaaagtttttccttctctgttctcaatgagcagtgcccattctccattaatctgagttacctcttttaattttggaatatccaatcctgtttcttcaactttcactgtattcaatgcttcattaaataccgctgacttcggatgatctgttgcaaatattttaacaataccttcctctgtcttataaactgatttataaggtctctctacgattaaatttttcttctcaagcttcatacagattcctcctttttattgaatctttggccccttccttcttgttatctgtattatataccttattatcagatttttaaatagttttttgatatttttttcactattttttatcgtatatatttattgttatttttttaacattattatccgtctattctcccaagtaacagatccgattctgaaaatcattctactcgaaacatccctttacattttccatctttctttgcataagaaaaagtgcaacgttgaacgctgcactttttctatgctaaatacattatccgatttgcaaacaaaaactcttggatattatatttttgcctgttttattttccataatagcatttcaggtagatttctttcatctcactcataagtggatatcttgggttagctcctgtacactggtcgttgaatgcctgctctgtcatatcatccaatgtatccaggaagtatttctcatctacaccgtaatctttgattgtcttcttaatgccaatcttctctttgagttcttccagtttagcgatgaagttctcaaatacttcttcatctgtcttacctttgcatcctgcaaaacgtcctaattctgcgtatcttgcaagtgcatgtggatactgatactgagagaatgttcccattcttgtaggtacttctgcagcattgtaacgcattacatctgtcaggattacagcgttagcaataccgtgtggcaggtgatggaatgcaccaagtttgtgagccatagagtggttcagtccaaggaatgcatttgcaaatgccataccagccatgcatgaagcgttagccatcttctctcttgcgattggatcattagcaccattctcatatgcagatggtaagtaatcaaatactgcttttactgccttcatagcaagaccatctgtaaaatctgtagccatgatagatacatatgcttcgattgcatgtgtcattacgtcgataccagatgcacttgtcagtcccttaggtgctgtcattgcattgtcaacgtctacgatagccatgtttggcattaattcgtagtctgtgataggccattttactcctgtatcagcatctgtgatgattgcgaatggagttacttctgaacctgttcctgaagatgttgggatagctataaagtaagctttctctcccatcttagggaatgtgtatactctcttacggatatccatgaagtccatagccatatcttcgaattttgcttccggatgctcatacattaaccacataatctttccggcatccattgcggatccaccaccaagagcgatgatcgtatctggctcaaatgctctgatctgttctacacctcttctagcgcactgcagagttgggtctggagcaacttcaaagaagcatgtatgctggattcccatctgatctaatttatcttcgatcggttttacataaccattcttgtacaggaaactgtctgttacgatgaacgctttcttcttatgcattacagttccgagttcatctaatgctacaggcatgcagcctttcttaaagtatactttctcaggtgttctaaaccacagcatgttttctctcctctctgcaactgtcttgatattgatcaggtgtttcacacctacgttctcagatacagagtttcctccccaagaaccacatccaagtgtaagagatggagcaagtccgaagttgtaaaggtctccgataccaccctgtgatgaaggtgtattgatcaggatacggcaagtcttcatagcctgctgatgtttctcaatcttttctgtctgtgatgggtggatgtaaagtgatgatgtatgtccgtatccaccatctgcaacaagctgctcagcttttgcaagagcctcatcaaatgtcttagctctgtacattgcaagtacaggagataatttctcatgtgcgaattcttccgaaatatcaacagattctacttcaccgatcaagatctttgtagccttcggtacttcaacacctgctaacttagcgatctcatatgctgattttccaggaatcttattatttaatgctccgttgatgatgattgtcttacgaactttatcaagttcttctcccttcttgaggaagtagcatccacggtatgcaaattctttcttaacttcatcataaatgctgtccagtacagttactgactgttcagaagcacagatcataccattatcaaatgtcttagaatggatgatggagttaactgccatcttgatatctgctgaatcatcgatgataacaggtgtgttaccaggtccaacaccaagtgccggttttcctgaagagtatgcagatttaaccattccaggaccacctgttgcaaggatctcatctgaatctctcataactgttgttgtcagctctaatgacggaacatcgatccatccgatgattccttccggtgctccggcttttactgctgcatcaagaacaacttttgctgctgcaattgtacatgcctttgctgccggatgtgggctgatgatgattgcatttcttgttttcaaacagattaatgttttgaagattgctgttgatgtcgggtttgtagttgggataaccgctgctaccagaccaactggttctgcaatctttttaattccgtacgccttgtcttcttcgatcacgccgcatgtcttatcgtttttgtacttattgtaaatgtactctgctgcgtaatggtttttgatgattttatcttctacaagaccacgtcctgtctcttctactgccatcttagcaagcgggatacgcatcttatttgctgccatcgctgcttcgaaaaagattttgtctacctgttcctgtgtgtaagtagcaaattttttctgagcttctctcattgctttcatcttagcttcgagagcttctacattatcaataatctctggtactgcgttttcttttttctttgtcgccatgttgattatcctcctgtgagtttttgtttgtttcgatggtcttagtataaccgtttgttaattctttgtcaataacattttgatatttttttcacatatttgatatttttttaacatgtagctttttcaccttaaaaaccttccagtttatgctctgtatgcagtaacatgtgtgattttggtgaattaggttttacaaagtattcctcatacattttctgaacgtcctgattttcatgtgagaaccgacgttttgcatttttatccagactgtaaagcttctgtcctctttcataagcaagttctcttccgtcatgaattggctgtcctccaccgcctacgcatcctcccggacaagccattacctctacgaagtcataatgaacttctcctttattgatgcgatccagaagagctcttgcattcccaagtccgctgactgctgcagttctaactgttacattatcgatctggaaatttgcttcctgtattccctgattttgattaaatccggtacttcttacagctttaaatgcatcttccggtggattctcacctttaagcagatagtatgcagttcgaagagctgcctccattacacctcctgttgctccgaaaattacacctgctcctgttccatcctgcattggccggtcactgtcaatatctgcaagtgtatccggactgatatgcgctgatttgatcatctttgtcagttctcttgtcgtaataactgcatcgatatcatgtcccgcatattcctgatagaacagttccatctccttttcccctttttttgccacacatggcattacagatactgtgtagatcttctcaggtgataccccaagcttctctgcaaagtaagttttcatcacggctccgaacatctgctgtggtgattttgccgttgaaagctgtctcaccagatgaggatactgtgatttgataaatctaagccatcccggacagcatgaagtaaacatcggacgctcttttaattcccctgcagtaaatctgtgcaaaaattccgttccttcttccatgattgtcaagtcagctgaaaatgttgtgtcgaatgcataatcgactcccattctcttcaaagcatcaaggatctttccgacagttgcttccttatcagaaagtccaaattcctcgccccatgctgttcttacagctggagccacctgtgcaactacgatcttatccggatctgcaattgcatcccatacatcttctgtatcatctcttgcccgtaatgctcccaccggacaatgcgtaatacactgcccgcataatgcgcatgaagcttcctctatcgttctgtgtccggctacattaatcgttgttcttgatcctgttccttctacatcccatacaccaaggctctgtactttttcacaaacctgtacgcaccgcatacatttaatacattttgaagaatccctgatcagaggaaattccttgttccacggttgtctttcaatttccatcttaaatggaatctctataatattcagatcattggcaactgtctgaagactgcagttgccacttctcgaacaagttacacattcacagtcatgctgtgaaaggatcagttctactgtcgttcttctatgccttcttacctttggactgttcgtatgaatgaccattccctcttttgcaacattattgcaggaggtgatcagcttctcttttccctccagttctactacacagacacgacaggccgcaatttcattgattccttttaaataacaaagtttcggaataggaatcccattctgggctgcagcttccatgatcgtggtattttcttttactgttatctttcttccgtcaattgtaagatttaccataatgtctctctgcctcccttaaatataccgtatccgaaatgatcacagcgaagacatctgcttgcctcctgttttgcttctttttctgtcatgcagttttcaactgcttcgaaatcacagactctttcacatgcttctctttctgtaagattcactcttccgcaaggtgtacggtcatccagatgtgcctccgggatttcaacatcgcaggaaatttcatgatgatatccaagatactcatcaatgttggctgcaacaacctttgcggccgcgattgctttgataaccgaagccggtccgcttgcacaatcccctcctgcaaatactccaggaagattctcaaatgctcccgtacttttagtaatgatcttaccacgttcaaccgggatacccgcctgttcgaagtgatgtgtctcaatattctgtccaattgctacgattaatacatcgcatggtatgtaaatatcttcttcacctgtaggtttgatacttgctcttccatctctgatcgagcttaccatctgaggtgtcacatagataccttttacatgatgattctcgtctacatctatagatgccggtgctttcagcgtctgtaattctatgccttccgcaactgctccttcgatttctccaggaagtgccgtcatgtctgctactcttcgtctatagacaatacttaccttctttgcacccagacgttttgctgtacggaccgcatccattgatacgttacctccaccaataacaaccacttcttttcctgtcagatctataatctggttttttcctacattacgtaagaactgcactgcggaaatgattccgtctgcatcttcattctctaatcctaattttttatctgtacttgctccgatcgtgatcagaacaacatcatactgttgtcttaattcctggatcgtaatatcctgtccgatcttcagaccattcttcacctgtacacctgtcttcaggattgctcggatatcatcgtccagtctttcttttggaagtctgtagttcgggataccataacgaagcattccgcccaattccggcaacatctcatatacggttgtctgatgtcccattaactgcagataatatgctgcacttaatcctccaggtccgccgccaaggattgcgatcttcttacctgtacttggtgcgcactgcggaggatctacttctcctgcaaaatctgctgctacacgcttcaatccacggatattaatagaatcatctaccatgtttcttctacatcttgcttcacatggatgttcacagatgaatccacatgtggtcgggaatggattatcctttcttaacagtcggattgcatccgcatatcgtccttcccctaccagtgcgatatatccaggaatatctacatgtgccgggcataaagatacacatggtacaggctgattatatgtacaggtacatcttccgttctgaatatgttcaatataatcatcacgataaccgatcaatcctttatataccatgttcgctgcttcataaccaatcgcgcagtctgcagattccataatagaaagtgctgtctgttccataatatctaatgtcttcattgtcgcttttccatccagtacttcacggatgaaattattaagctgtcctaatcctatacggcaaggcacacattttccgcatgtctgtgcatgacataactcaagaaatgctcttgccatatctactggacataaccccggtggactcgattcaattcttctttccagatctttatagaggccttccattacgatctttgctctttttggagaggcaatttccagtctgctcattctttatccctaccttccatttcatttatcaatttatagtccaaataaattgtaattatcagtcttttgaacaatgtaatattaactgcgttgacgatattatatcatttatttgataatttgtaatcatatttgttaatagtagtaaatttaacgctatagtcagatttttaacaaatcttgaatattattccgtacaaaaaaaatatattatatatgcaaactgttccgttcacttcgttcaaagccactgtttgcatatataatatatttttttctggtttcaatatcgaattttataaaaaaaagaggaaccccttttggtagttcccccctctttataaaattgacttctaactatacaagttcgatcagaacttccatagctgcatcacctttacgctgaccgatctttacgattcttgtgtatccaccgttacgatctgcatacttaggagcaatctcatcgaataatttagctacgagatcaacttcttttgtatttttcttctttccagcctgtgcagttggaacttcctttacaggataaagaaccttcagcatctgacgacgagcatgcagtctgcttggcatatcctttttgattgttttatcaacttcgtcatatacagtaactttcttaccatctacaacttcttttactctcttgccatctttgtctttgcgggcaactttagcttttacagtaacttcttcgaagttatctttttctttaacagctaatgcgataagaccttcagcgatcttgcggatctctttagccttagcttctgttgtaacgatctttccgttattcagaagtgctgttacctggtttcttaataatgcttttctctggcttgatgttctgccaagttttctatattttgccattttaaatatcctccattataacacttggttatgcttcttcgggcttactagccaaatgctctgccatgcactttcgggcttactgacagattattcttcacctttactcaggcttaagcctaactcatctaattttgcaagtacttcttccagagacttacgtccaaggttacgtactttcatcatgtcttccggtgttctgtttgtcagttcttcaactgtattgatgccagctctcttcagacagttgtatgaacgaacagaaagttcaagttcatcaatgctcatctcaagaactttttctttttcatcgtcttctttctcgatcataacttctgcagcctgagccacttctgacaggtcgataaagagtttcagatgttcgctaagtacctttgcagccaaacttacagcttcgtccggaagcagtgtgccgtttgtgtatacatccaatgtaagcttatcaaagtctgtaatctgtccgacacgggtattctctactgtaaggttcactcgttccactggagtgtagatagaatcaattggaatcactgcgattggcagttcgtcatttttattcttatcggcactcacgtagcctcttccatttgtaatggtaagttccatatacaatttgctgtctgcaccaccgtttaatgtagcgattacagtttccggattcatgatttcaatatcctgatccacctgaatatcagctgctgttacaacgccttcgccttcaaactcgatataagctgtcttaggctcatcagattcagatgtgtttttgattgccagagatttcaagttcatgataatctcagtgacatcttccttaacacccggaatagaactgaactcatgaagaacaccgtcaatcttaacctggctgattgctgaaccaggtaaagatgaaagcataattcttctaagagaattacctaatgttgtaccataacctctttcaagaggttctacaacgaatctaccatatttcttatcatctgaaatatcagttatttcaatattgggtttattaaaatcaaacactaagtccacctcctgtgggttacggtttattatttagaatataactcgacgattaacatctcatctacaggaacatcgattgcttcacgttttggaagttcttttactgttcctttcaggttttccagatcagcttctaaccattctggaacaagacgtccgcctgtaacctcaacgatctctttgtatcttggtgagctcttcttagcttctttgatttctacaacatctccagcctttacaaggtatgaagggatgttgatctgttttccgtttacaagtacgtgcttgtggtcaacgatctgtcttgcttcacgtcttgttctagcaagtccaagacggaatacaacgttgtcaagtcttgactctaagagtaccatcaggttttcacctgtcataccattcatcttagatgctttcttgaagtagttcaggaaaggtttctctaatacaccatagatgaatttagctttctgtttctcacgtaactggagaccatactcgctcatttttctattcgctctttttaactgtctgttagactttttatcaattcctaaataaactggatccattccgagggatctacatcttttaagaaccggaactctatttactgccatgtttttgttttcctcctatataattcggacacatacaatccgttaacgtagtgaataataatagtactagactcttctgcgttttggtggacggcaaccattgtgtggtactggtgtaacgtctctgatgcttgttacatcgattccgcatgcctgcagggcacgaattgctgcttctctacctgaacctggtcctttaaccattacgtcaactgattttaaaccatgtactaatgctgctttagctgctgtttcagctgccatctgagctgcataaggggtagattttcttgaacctctgaatccgagaccgcctgcacttgcccatgacagagcatttccctgtgcatctgttaatgttacgattgtgttattaaaagatgactggatgtgagcctgtccgtgttcaacgtttttcttgacacgtttctttgtcactttttttgtaactttctttgccataataaaactaacctactctttccttaaataaattatttcttcttgtttgctactgttctcttaggaccttttctagttctagcatttgtcttagtcttctgaccacgaactggaagtccttttctgtgacggattcctctataacatccgatttcctgtaatctcttaatgttgagggcgatttctctacgaagatcaccttctactgtctgagtctcatcgattacagcactgattttctttacatcgtcgtctgtaagatctctacaacgaatatcaggattaactcctgcttctgttaagatacgagttgcacttgttctaccgattccgtagatataagttaatccgatctcaacacgtttgtctcttggtaagtctacacctgctatacgagccatgtgaatttcctccattttctttcattgttaattgtctttaataggggacatgattttgtcccaggcatgttcggtatcatgccctttccggccaccgctcatgttatggaaactatgcggtaatgacgagccggcattagaagcaatatacgaggatcgtcaccggtctttcgggtgcgccttgtatatttgaaatagtatccacaccgcctggcgtgtccactatcagccgcctaaatacatcaaacattgctcagaattaaccctgacgctgtttgtgctttggattttcgcagataatgcgaacgcttccttttcttttaattactttgcatttttcgcaaattggttttactgatgatctaaccttcacggggatcctcctttcatccattgctatgcctttgttgctacactgctttctgttgaaatcgcaactcagagattccagcgcataaatacacctagaaaacgtgcttatatagtatagcatttatttgcaagataagtcaatagttttttgacttatttttacacatttttgttagaattcttatttatctctccagatgattcttccttttgaaagatcgtatggtgacagctctaatgttactttatctcccggcaggatcttgataaagttcattctcagctttccgctgatgtgagctaatacctgatgtccattctcaagttctacctgaaacattgcgtttggcagtttttctactacagttccttcaatttcaataacgtcagcctttgacattctatcttcctcctacttctcttctttcatccaatccttaattaactttcttatgcctgcatcatcaagttctttcatattatatattccgtgaacgatctgtacatgctttttcttctttttcttcggatggccgagtgttctgatgcggccatccaccagatatacatatgtatcatccacttcttttatgatatacatctgtgctttatcatgtccggcttttgatcttgcaagcattcctgcttcatacatcaccatatctgtttcctcttattatatccgtctattcattgtcacaggttaaggacagaattctaggttcgccttcggtgatcagtatcgtgttctcataatgtgccgataaagaaccgtctcttgttacaactgtccagtcatcatccagccagtcaacttcgtaagttcctatattgatcatcggctcgatggcaagtgtcataccgggtcttaattttacacccttgcgtcccacttcataattcgggatttccggtgcctcatgaagcgctgttccgattccatgtccacaaagatctcttacaacaccataacctctttcttcggcatatctgccgatcgcaccggatatatcaaatagatgattccctgctttggcatattttataccctcaaaaaagcattcttttgtaacctggatcagttttttcgcttcttcactgacttcaccgaccgcatgtgttcttgctgcatccgaatgataccccttatagattaccccggcatccagactgacaatatcaccttcatgaatgattctgtgtttatccggaattccatgaacaacttcctggttcaccgatacacagatcgatgcagggtatccattgtaattcaggaaagaaggaatacatccatagcttctgatgattttctcccccagtgtatcaatatccttggtactcattcccgggtgaagtgctttttccagttcattatgtacacgttcgagtatctttccggcttccgccatcaattcgatttctctttcagatttaatcgtgattgccatagtcttatgctccaagtatctctacaattgctgcaaatacatcattgatgtcaaccgttccgtctactgtctttaaaatacctgctttagtataataatcgatcaaaggctgtgtctgctcatgatatacattcagtctcttctgtactgtctccggtttgtcatcgtctcttaaaataagctcttttccgcatacatcacagattccttctgtcttggtcggtgcatataccagatgataagttgctccacatcctacgcatgcacggcgtccacccatgcgctttacaatattctcatccggaacattcacatcaattgcataatcaatcttgtctccgaattctgccagagccttatccagagcctctgcctgtggaattgttctcgggaaaccatccagaacataaccattcttacaatcatcctgctgtacacgatctactaccagatctactaccagttcatccggaactaacagtccctgatccatgtatgtttttgccttatttcccagttctgttccgtttttaatattcgctctgaagatatctcctgtggaaatgtgtggaatatcatatttcgctgcaatcttttttgcctgggttcctttgcccgctccaggggcacctaacataataattttcattggcagttcctccttatagcattttaacccgcgaaaaaaatcttcccgcgagtcaaaatattagctatttaaaaatcccttgtatgttcttacaagcgtcattgaatcaatttgtttaagtgtttccaatattacactgacaataatgatcagagaagtaccgccaaaggatacttttgctccaagccatccattaaataatatcggaacaatctgtaccagaatcaatccgcatgcaccaacaaaaataatataattcaagatttttgtcaaatattctactgttggtcttcccggacgaattcccggtatgaatccaccgctcttcttcatattatttgcaatctccaatggattaaatgtaattgaagtgtaaaaatatgcgaagaatacagtcaggacaatatataataccagtccccaagagtatttaatctgttccgggttgcaccagttactctgattcaatcctcgaagtatctcacttccgattccacttccgttatcttttccaaggaatgatgcaattacaattggaaattgcatcaaagatgatgaaaagataatcgggataacacctgcagtgttaaccttcaacggaatgtttgtagactgaccaccataagatcttcttccaactattttctgggaatactgtacagcaattcttctttctccatcctgcaggattacggtaaatacgaccaatgcaagaatgattgcaatgattacacatactgcaagacaagcggaagcaatcgcttttcctttcacgaactggtcaaataacgtcttcatatcactcggaatacgagagataatgttgatcaccaggacaatagaaataccattgcccacacctttttctgtaattctctcaccaatccacatcagaaaagctgatccagccgtgagtgttaatacgacaattgctgcattaacaaaattatacttcaccagaagtccctgacgtccaaatccgaccgccatagctccagattcaattaaagcaagaccaacggtaagatatcttgtaatagcaacaattttctttcttccggtctcgccgtcacgctgcatttcttccaactgcggaattgcaattgtaagcagctgaactatgattgatgaagtaatataaggtgtaatgcttaaggcaaatacagacatttgctcaaaagagccaccggtgaaggcgttaaataaattgaacgcctctccagtgttttgagcaaagaaattcttaatatattcaccatttacgcctggtgttggcaactgcgatccaattcgtattacgattaacatcaaaaatgtatatccgatcttttttcgaatatcttttatcttgaatgcctttcgnnnnnnnnnnnnnnnnnnnnnnnnnnnnnnnnnnnnnnnnnnnnnnnnnnnnnnnnnnnnnnnnnnnnnnnnnnnnnnnnnnnnnnnnnnnnnnnnnnnnnnnnnnnnnnnnnnnnnnnnnnnnnnnnnnnnnnnnnnnnnnnnnnnnnnnnnncctgaactgtaagtttcttagtaagttcgccatttccaaggatcttaactccatcctttggatttgtaacgataccctgctcgattaatgtatctacagttacaactgtatcattctcaaatacttcaagagcacttacgttgataccaacgattgtcttagtgtttctgttagtgaaacctctctttggtattcttctatataatggcatctgaccaccttcgaaaccaggtcttgtacctcctgaacgagctttctgacctttatgtcccttaccagctgtcttaccatttccagaaccgtgtccacgtcctcttctgaaattatcactctgctttgatccgtcagcaggtcttaagttagataaatccattgtgacacctccttatccgaataaattaattatacttcttctacttttaccaggtgagaaacctgtttaaccatacctcttgttgctgcattatctggaagtacaacagttttgttcagcttcttaagtcctaatgcttcaacagttttcttatgcttaggtacagcaccaattgtagattttactaatgtgatttttaaatctgccattttgttctacctccttagccaaagatctcttcaacagatttaccgcgaagcttagctacttcttctggagttttaatctggcgtaatccttcgattgtagcaagtactacattctgtttgttgttagaaccaagagattttgtacgaatgttcttgattcctgccatctcgattacggcacgcgccggaccaccggcgataactccagtaccttctggagccttcttaagtaatacagaagcgcctccgaatttaccgatataatcatgtgttacactgtcattttcatctaatgctacagagatgagattcttagctgcatcttcttttcctttgcggattgcttccggaatttctgtagcttttcctaaacctgcaccaacatggccatttccgtcaccaacaactactaaagctgtgaatctcatattacggccacccttaacaactttggttacacgtttaattgatactactttttcgtttaattctaatgaattagcatcaatacgttcctgtctcatgtgtgctcctccttctagaaattcaacccagcttctctagctgcgtctgctaatgcctgtactttaccctggtaaataaatccgcctctatcgaagacaacgtctttaatacctttttcaagggccttttctgcgattacttttcctaaatatgctgctgcatcaacgttgttagttttctccaggtttgctttcacatctttctgaagagtggaagcggaaaccagtgtatttccaactgtatcgtcaataatttgagcatacatatgattattacttctgaatactgctaaacgtgggcactcagctgtaccagataaacggttacgtaattttctgtgcttgtttacgcgaacttcacttcttgattttttgctaaccattttcacactctccttacttattttttaccagtcttaccaactttacgtctgataacttcatcagcatacttaatacctttacctttgtaaggctccggtcttctcttgtctctgatttcagctgcgtactggccaactttttctttactgagtcctttaacgatgatcttgttctgaccttcaactactgtctcaacgccttcaggatcttccatctcaactggatgagaataaccaaggttcagtgttaatttgttacctgattttgctgctctgtatccaacaccattaacttccagaaccttctggtatccttctgttacaccaataaccatgttattgatcagtgttcttgtaagaccatgtaaagatttcatcttctttaagtcatttggtcttgttacaacgatttcttcgccttcctgtttgatttccatctctgttggaagtgctttttcaagtgttccctttggacctttaacagtcactacattgttctcagcgatctcaacagttacgcctgccgggatagcgattggatgtcttccgatacgtgacataccttgttcctccttaacttagattctcggaaaagctcttatggcttctctgttttcagtttctatatggcaatcagttcaggctgtgccttacggcacaccttcactaagttgctcgcgggtttcttaccaaatatagcagagaacttctccaccgacaccaagctttctggcagctttatcagtgattacaccctggtttgtggaaatgattgctgttccaagtccaccaaataccttaggtacattctcgcttgaagcgtatacacgaagacctggtttagaaattctcttaaggcctgtgataactttttcgttcttatcagcaccgtatttcagtgtgatgtgaattgttttgaatactccgtcctcgataacgtcgtatttttcgatatatccttcatctaacaagatattagcgatagcaagcttcatcttggatgccggaacatctacagtatcatgtttagcagtatttgcattacggattcttgtaagcatatctgcgattggatcactcattgtcattgttctttcctcctaccaacttgctttcttaacacctggaatctgtcctttgtatgctaactcacggaagcaaacacggcagataccatattttctcaaatatgcatgtggacgtccacagattctgcaacgattgtattctcttgtggagaatttctgcttgcgctgctgttttactttcattgctgtcttagccataatttacctccttattttgtaaatggcatgttgaactgagtaagcagttcacgtgcctcttcatctgttttagcagtagtaacgaagatgatatccatacctcttaccttatctactttatcgtattcgatttctgggaagatcagctgctctttaattccgagagcgtagttacctcttccgtcgaatgcgttaggatttacacctctgaagtcacgtacacgtgggagtgcaaggttaaccagacggtcaacgaattcatacatcttttctcctcttaatgtaactttacatccaatcggcataccctctctgatcttaaagttagcaacggacttcttagctttacaaactacagccttctgacctgtgattttctccatgtcagcgattgcagcatctaaaagttttgcgttatcttttgcttcaccaacacccatgttgataacaactttatcgagttttggtacttccataatatttttataaccgaactttttgatcattgcatcaatgatctcgttctggtactgttctttcagtctactcaaagctttggacctccttcctcaaattaatcaatcacttcgcctgttgatttagcgtaacgtacttttttgtctccgtccatcttgataccaactcttgtagctgttcctttgtgaacatacattacgttagagatatcgataggtccttcctgacgaacgattccgccttcctggttctgagcacttggttttgtgtgctttgtcagcatatttacgccttcaacgataacctttccagtcttctggttaacagcgataactttgccttctttgtctttatctttaccggcgattactttaactgtatcaccttttttgatctttaacattgacatcttacgcgcacctccttaaagtacttccggagccagagaaacaattctcatgaactgtttgtcacgaagctctcttgctactggcccgaagatacgggttcctcttggtgtcttatcatcttttataattacagcagcattttcatcgaaacggatgtaagatccatctttacgacgagtactgtttacagtacgaacaactacagctttaactacgtcaccttttttaacaacgccgcctggtgttgcatctttaacagtcgcaacgattacatcaccgatacttgcatatcttcttgttgagccgccaagtacacggatacacagtaactctttcgcacctgtgttgtctgctactttaagtctgctttcttgctgtatcatgcaggtttccctccttatactatttcactttttccataacttcaacaagtctccatctcttgtcttttgacagaggtcttgtttccataacttttactttgtcgccgatattgcactcattgttttcatcatgtgcttttaatttatatgtcttctttacaattttcttgtaaagtggatgttttacatgatcttcgattgctacaacgatagttttatccatcttgttgctgacaaccttaccaactctggtttttctaagatttctttccacagtctgtaactcctttcattttgtgagttttcagtttctactgagctgccttttcagtgattactgtctgaattctggcaatatttcttcttacttctttaattctgcttgtattgtccaactggtttgttgcgttctggaatcttaaattgaaaagttcctttttagcagctactaattcttcattcagctctgcagctgattttgtttttaaatcttcaacaaatgcattaattttcactgttatcaccgccttctaagtctgcgcgagaaactactttacatttacatggcagcttgtgagttgcaagacgaagagcctctttagcaacttcttccggtacacctgcgatctcgaaaagaacgcgtcccggtttaacaacagctacccagtattctaaggttcctttaccagaacccatacgtgtctcagctggtttcgtagttacaggtttatctgggaatatcttgatccaaactttaccaccacgtttgatgtaacgtgtcatagcgatacgggctgcttcgatctggttagaacggatccagcaaggttccgttgcaacgataccatattcaccgtttgtaatctggttaccgcgaagagctttacccttcatggtaccacggaattgtttacgacgttttactctttttggcattaacatgattatctatctccttccttaactgttttctccggaagaacttcgcctttgtagatccaaactttaacaccaacttttccgtaagttgtgtttgcttcagcgaatccgtagtcaatgtctgctctcagtgtctgaagaggaattgttccctcgctgtagaactctgtacgagccatatcagctccaccaagacgtcctgatacagaagtcttaacaccaagtgctccagatttcatagttcttgacatgcatgatttcattgcacgtctgaaagaaatacggttctcaagctgtaatgcgatgttctcagctactaactgagcatctttatccggtctcttgatttctttgatgtcaacgattaactttttatctgtaaactgtgctaattcaccttttactttctcgatctctgctccgcctttaccgattacaacaccaggttttgctgtgtaaacgataatctttacgcggtcagatgctctctcgatttcaattttagaaataccagcactgtataatctcttcttaagatatgttctgatttcatggtcttccactaagcagtctgcgaaatctttctctgcataccatcttgagtcccagtctttgataactccgactctcaaaccatgaggattaactttctgtcccatgtttgccctccttatctttcatcaagcacgagtgtaatgtggctcattctcttttcgattctgtaagctctaccctgtgctctaggtctgattctcttcattgttggtcctttgtttgcataagcctctgcaatgtacagattctcagcattcatgccgttgttgttctcagcatttgcaattgcagactctaataatttctttattaaactagaagcatatcttggattgtatgtcaaaataccaagtgctgttgttacatccttacctctgatggcatctaatacgaagcatgctttctgaacagaaactcttgcgtaagataacttagcagaaggtcttgtatctttgttagcatttctttctcttttaatttgggatctatgtcctttagccatggatgaaccctcctttcacaatctaattatctaactttggatttcttttcgtcttttccgtgtcctctgtaagttctggttgctacgaactctccgagtttgtgtccaaccatatcttcagtaacatatacaggtacgtgctttcttccgtcatgaacagcaattgtgtgtccgatcatgcttgggaagattgtagaacgacgggaccatgtcttgattacagacttgtctccagcctcgttcatagcatcaacctttttaagcaggcttgcgtctgcgaatggtccttttttaatagaacgtgccataggttctaacctccttatgaaaactatttaattgctttaccatctcttcttcttacgatcatcttgttagaagctttatttttctttcttgtcttaagaccaagtgctggtttaccccaaggtgtacacggacccggacgaccgattcctgtcttaccttcaccaccaccatgcggatggtcattcgggttcataacagaaccacgaactgtaggtctgattcccatatgacgtttacgtcctgctttaccaatgttgaccaggttgtgatcaccatttcctacaactccgatagaagctctgcactcaagcggtaccattctcatttctcctgatggaagtctgagagttgcatattttccttctttagccattaactgagcactgttacctgcggaacgaaccatctgtccgccttttccaggatgaagctcgatgttgtggatctgagtaccaactggaatctgtgctaatgggaggcagttaccgatcttaacttcagcttctggtccattcataactgtcattccgtctgtcagtccttcaggtgcgatgatatatgctttttcaccatcttcatagcagatcagagcaatgttagctgttctgtttggatcatattcgataccaagtacagtagcgtggatattgtcttttcttctcttgaagtcgataattctatattttttcttagctccgcctccgcggtgtctaactgtgatttttccttgattattacgtccagcctgtctactctttggagctaacagagatttttctggtgttgtctttgtgatttcagagaaatcagaaccagtcatctgtcttctggaaggcgtatatgggcggtatgttttaattcccatgattaatctcctttcaattgtttattgtcacggtttctgtccgtatgctttgcaatcttataatccctggaagatctcgatatctgcgctatcttctgtaagttttacgattgcttttttagttttagctgtttttccgaagttgtaagttccacgaactcttttcttctttccatcgttgttcattgtgtttactttctctactttagttcctgtaaacatcttttcaacagcttctttaatctgagattttgttgcttctgggtgtactaagaaagtgtatttcttttctcccataagttccatactcttttctgttactacaggtttaaggattacatcataatactgaacgtttgccattatgcgtacacctcctcgattttagcaacaacagcttttgttgtgattactgtgttgtattttaagatatcgtacacattgattgtattagtctttgcagtcttaacatcagcgatgtttcttgctgaaagctctgcgttcttgttgtcatcctctaatactactaatgctttagatacatctaaattcttaagaatgtttgcaaagttctttgtctttgcttcttcaaagttgatctcatcgattacgatgaatttgttttcttcaactcttgatgtgagtgcagatttcagagctgctctcttctctctcttattcattttgaaagaataatctctcggaactggtgcgaatacaactccgccgcctgtccactgtggagctcttgtagatccctgtcttgcatgaccggttcctttctgtctccatggttttcttccaccaccagaaacttcagaacgtgtttttgctttctgtgttccctgacggttatttgcaagctggcttacaactgccatgtgtacaagatgttcattaacttcaacaccgaatacagcatcgcttaagtcgatcttaccaacttctttaccttcgatattataaacagatacgttagccatcttaagtgtcctccttccttcgccaaatcttagttagcttttactgcttctttgatagttactaaagatttcttaggtcccggtactgaacctttaaccagaagtaagttgttctcagcgtcaacacgtacaaccacgagattctggactgtaatctttttacttcccatgtgtcccggcatgtgttttcctttgaatactttacttggatctgaacaagcaccgtttgaaccagcatggcgatgatacttagaaccatgagccataggtcctcttgactgattgtgacgtttgattgcaccctggaatccttttcctttagagattgcagttgcgtcaatcttatctccagcagcgaagatatcagccttgatttcctggcctaactcatattcgctagcattttcaaacttaaattctcttacatatctcttacctgtaacaccggctttagcaaagtgtccctgctctgcctttgttacaccgtgacggtgaacaatttctttctttccgcctttgtctttgttgatgatcttgtctttcttgtcaacgaatccaacctgaacagcttcgtatccgtcattctcaacagtcttaatctgtgttacagcacaaggtccagcctgaagaactgttaccggagtaagtgttccgtcttcgttgaagatctgagtcattccgacttttgttgctaaaatagctttcttcattttattttacctcctgtgatttacagcggaacgcccgattggacgctcatcctaaattataggaattactgcttcttatttcattttgatatcaatagctacaccagctggcatctctaatctagataatgcatctacagtcttctgtgttggtgcaatgatatcgatcagtctcttatgagttctctgttcgaactgttctctggaatctttgtatttgtgaacagctcttaagattgtaactacttccttctttgtcggaagtggtacaggtccactcaccttagatccgtttttctttacagtttcgatgattttcttagcggatgcatctactaactgatgatcatacgctttcaaagtgattctcattacttgacttgccataaaaaaagtcgcctccttttcgtacttataatcgagtacgacaagcggtgactgtacactctcccgtgtgtgtcgtgagaacccacacgttgttaccacatcgcagtggccgttatagtagtttcgtacagtgacttgtcgccagtttcctaacttgacattcgctccacggaaaacctgctaattcctagcagcaacctcacgcttcaacgctatcatgtcacagctctcttagtatatccgattcccatacattttgcaagtactttttttgtttttttattcatacaatttattttgtactttccactcaaacatattaagtttttgccaacaaatagtattattttctcttattttagcattatactttctaatattttattgatatttcaaattttccagactatactattactataagccaaagcaatcaggggagtcagacatcatggatgtgttgcttcccttttttgcacaatattataatgaatggagtgtgttacatatgagtgaaaatggaaatcaatctcgtgaatggaactctcgttttggttacattatggttgccgcaggagctgcgatcggcctcggaaacatttggaaattcgtatatctcgccttgtagagaaagtaaccaaaatccttatgcctgtactctttctcttccttattatatgtggtatctgagcaatgttcgtaaccagcaatgcaatcgatggtttaaaatgctatctcctgcctgattttagcaaattcaatttcactgtattttcccaggcagcaacccaggttttattctctgtcggaatcggtaacattatcgtttccctcagattcggactcttaagtaatattaaacttccgtggctggatgcttccggaatatcacaccttgggatttaaagaatacgaaaaagaactcaccaatgacggtaagttcggcagagtaactttatacgacaaaatccttacctgcattgttgttccgatatttatgataatcatcattttaaatgtattcggattcatacgatgatttaaaaaaagtcatccgacaagcttgtaattttgatattttttagctactattaataagcaaataaaatttttataattttttgtattttcatacattggagaataaaagaatggacatcaaaagttggaaaatcatgttagccgttgatgattacggcagctttacccgcgtaggcgcggaacttggatacacacaatccggtattacgcaaatgatgaaaaatctggaaaagaaagtcgggttcccgctctacatcaaagaccaccacggtattacacttacaaatgaagcaaagtcacttattccggcaatccgcacattattgaatgccgatgaagtaattcatcaggaaattgctgcattaaatggtgcgcagagaggaaccatccgcatcggcacttatctaagctgttcaattcactggattccaaagatcatccgagaattccagcagaaacatccggatatcatcatccaggttatcgaaggggttgaaggagaacttgccgactggattcaggaacgacgtgtagatatcggatttatcagtctgcagaaaaatcataaatatcagtttcttccggtcatgaacgacttgatgtacgcagttgttccagaaaacgatcctcttgcaaaagaagaagaaattccaatcgaagcatttgaagatgcaccttttatcatcacagaatacacaccaggaagcgacgtacaccgtattttaaaaaagcataaaatccatccggatatccgctatgtaaccagaaatgaattttcttccctttccatggtcgaacacgaactaggatattctatcctcccgggtcttttacttcgcggccagcagggaaaatttgtaaaacgtccattgaagccaacaattacaagacagttaggacttgcatattcttctctcgaaaatctgtcacctgcttcaaagacttttctggaatatgcaaaagactttctgttagatgattaagtcaatattcatgcagagtaaatgacattctttctcatttattcattaaaattgcacgaaacacctcccgctttatcacgtttttcttgttgcaatgccagttttttccatccttattgacatcatcgaattaacgtgatatattaatagtaacttaaagacagacacagacaccaatggcggttcctcatcgatgatataatacaggaactgctcttttagaattagacagtatgatcgtctgtttttatggcaccattattatggttgttattgcagttatgcctgagccggttgtttcccccaagaataaccttgcgaaggtgaactccaattgatatatacatcctccacaaggaggagcattccccagctttgtatataaaaacaaaactgcaatgcaacgaggaaaaacctctcaatgacataccaataagaaagagcacgacatgttcagatgtcgtgctttttcttattaattctctctataagactatagttcgattgacttttaacgtattagttgataaaatattaatgtaaagcaatgcgtgaatttatagaaattctttacaaatcggggtgtatatgatttctttcatagtgctaaaaaggcatttccttgcctggtacttatttattcacatgtatagcttgttaacaatttaatatgaaaatctggagggatgaatttatgttattagcaatccaaattttattaggtgttttgtttgctggaacaggtattggtcttgttgtcgatttaggcaagaaccgaatggatgaactaaaaggttctaccgggaaacaatgggcatctgcttttactgttggtatcattgctaactttcttgacactttaggatgtggctcttacgcaccatctacatttatgtacaaacttttcaatcagattgatgacatcgatattcctggtacactgaatatcggtgatacattcccagttatttttgaggcatttatcttcacaacttctgtagaatgtgatcctcttttcctttgggtaatgttcatttgtgcagctgttggttcatttggatttgcatctatcgttacaaaatggccacgtaacaaaatcagaattgctcttggatgtgcgatgcttccgttggcagtagtaatgttatgcaaaaatcttggtgtcggacctttcggtttagttggtactgcagttggattaacaggttggaaactgatcgtagccgcagcacttaatgttttatggggcgctcttatggatattggttttggactttatgcaccttgtatggcaacatgtcttctgcttggtgttgatgctcagacatgtttccctgtcttcatgggatcttgcgcatgcttaatgccagcttgctctatcgaatttatcaagtcacatagatacgatgttgcacatacaattggtaatgcgataggtggatgtatcggtgtatttatcgcatggaaattagttacaggtcttccaatgttctggctcattaatcttatctgtctcgtgcttgtatggacttcttacactttacttagtgcagcaaagaaagacaaagcaaaaggtattgcttaatatctgtgaaacatatatataagcaaaatactcatttaaacaaaacaacacacggatggcagtctgttaagactgccatctttatatcattgtatgtaagagatcctgcttctggcagtttccctgcattacaattttattatggagaatatcatatgtttgttaacgaatatgtaatgacacgtaaacgctacgacaaatgggcagctccaaagttctggagacttcctatcttctacgtatattgtgtaatctttgcatccggaactttcggctggatttattttcatcatgtaggagcttcactcagatggcagtctgttggtgccacactttcatttatagccatctaccgtggagtatttttcaaatggatgcacgctgataaaactttccgtgtaatgcgtactcaatatttcaacgataaagactggacctgtaaagtcatgatccgcgaaaaggacattgccctttacattaacaataagataaataaccatgtaaactgggaagatctaaccaaattcgaagaggcgaaaacttattacaagctcacttccaaagaccagattgaaggcgttatgcttgacaaagagtctttcaccaaaggcgactccgaaagtttcaaacaatggatgttagaacaacatcccgaaatcgaatacggacctatcgatcctgcattcgataaataaaaaaagagaagatttccattcgcaagaatgaggtaatcttctctttttcttattgtttgttctatttccgacactttctgtcgtagatatcttcccggttctatcgtccttcctgttcatccttatgacgcatcttaagcttcagaagagcttttgccttcagacagtcaaccctcaccatgttgttctctccgacaacatctgtctctgtaccatctgcgcttttattaatatccacaattccgtccagataatcattttctacaacaaattttgcaacagtaccactaaaattaagtcccgtcaccggaattcctctgattccaagctgttcacatgtatttgtataatccacatcgctgtttccccatccatccgatgatatgattactccatctgcacgcatacattctgccattgctgccgctctggttcctaccagcattttatctttgttatcatccggcgttccgactatgatcagtccgagaagatccagatctgtatcctctgccactacttccaacagcggatctctgaaatgatgtaatgatgtttcttttgtcgatggtccaattcccataacttctgcacctcctgtagttactgcatcgagcggatcatgccgtctctgtactcattcggagtaatcataaccggcatattgcccatatcgataatcgaacgtccgccttcaacccctgacggttcatccgggaacatccatgtatcatacatagctccctgtccagccacctgacggataattacaaccttcttctttccaggtcttactttatcatgatattcatgacgttctgtgcacttatcacctttgaactttttcagtttctctctgtatgtctgaatgaattcatcacagagtttgtgtgcagtaaatggcccatgtctctcctgacccataccagcagcaaatgttacatcaaacgaaataatataatcatcatctcccggtgtacctgcacggtttaagcacaactgttccttcagattgccttctgatgaaccaaattcgtgacactgctttccgttcacatcaacgcccgtcaacataacatatacacccgttatagtgtgagttattccttctcccaatttaccaagcacttttgttgagattggaatgatatccataatcgtgttcgtccatctgtcatggtctcccggtttaataatctgaatatcaatcttctcaatacaatcatcctgtgcaacaagctgatcgatcatctctttgctgaccgtcatatggccatccgttgtgatattattgtactcaccccattccacatctgtcatatgaaatgctttgatcacaaggcgtcttaagtctatctctttctcagccatcatgtcacctcctaaaaaaattacggacatatatcaatcaaagtccgctttttgcggtttccccgtacactttgatagcaaaaacaacgtatccattcatcctttttatattgttttcttatttttcctatgtcctttccatatctctagtatacaatatactgtaagaaattccaatatactgtctgattcttttttcaaaaaagggcagatgcaaaatacatctgcccttcttaagatcaaataaaattcataaaatcgaattagatcttagcaacatactcgaatggcaacggaacaatctttcctggagtttcgattttctctaactgctccagagttgcctttacgatctgtgtctgctgttctacattgtgaggaccacccgcattagcacccataggtaccaacggagctaccgcacgaggagtaccagtctgacgaacaactggtggaagagctgcaataataattgtaggaattccagcttcttcaatcgctctctgcaccaatactgcagagcggtggcaggtacctcagccagcggtgaggattactgcgtcaacatcctcatttttgaacatttcagcgatagcaggaccagtttcatgtttgaatttctcctggtttccaccaccacccatgaatccagcatgtacaggagcacaagctctgataaatccttcttttgctaattcatgaattctgtcaattgggaacatacagttgatgtccttgttaacatcactgttatcatatccaccgtgtgataccatcagatcactagatggtgtagtgttttcgatctttctccatgtccagtcaccggcaaggttaaatctctcctggctcttcttgtgaacacctgctgctgttgcaagagcgatagacatatctttcagctcttttgttacaggagcccatactgacggtggagtaataggaacgaatatttcagactgtaagcctttaacaaccgttaaactcatttttaatcctccttattagcatccaaacgtgcttgcatttcttgttgtttgcgacgttctttttcaatattgctgacgtatttctcatttacttccggtccgagctgttccgggaaactcatgttccagccaacttcctgacctactttcggttctgtatcgcagatgaacattctcttcggagctttaaagaaccccagacgtccttttaagtcaacgctgatactacagtcgtcgaccgctacgatgacaccttccatataaatgatcttatcgccatagtgtaaacgttcattatccattatgataacacctgatcttagtcgtatttttctttacgtttctggctcattggcagagactgctcgttgtctacgagttcaatcttcttaccgcaagctgcttcgatcagctcaacgttagtagctttaacgtttggattccacttcttctcagcggcttttacttcttcaccagccatagctgctttcagcatagcaagggcacggataccctcttcctggcaaagtgtattacatccaagtacttcgttttcgataccagattctgacttgttattgtcaaccatgtactgcatgtacttgttaccaacaacgagtgcaccctgaacagcacagaatgaaagtcctactactggaattcctctcataccgatctgctcgatgtggcttgcgaagtcgatgtggttatttccgaatccttctgttgtaacgaaagctccgtcaacatccatcatttctactgtatgtcctacacgacgagatacatagtacttctctgcattgatctgaggtgatcctacgaatacaactccgcaaaggtcaacttcttcatcatgtaaagcttcaagtacaagtggctctctccagtaatgtcttgacatctctttagatgcaggtccgatacatgttaatgcatggatacatccatcaagtacctcaagtggagatacgcatacaggtacgtttcctaagtctacgttagctcttgcgccaaggataccaactggttctacaggaaggatgaagttatcatgcatagctccctgtcccatgatctcttttacgattacgactttcttcttacctggacgacggatagatttcagttcttcgtcttcaacgatgaagctgtcatctaattctttcattacttcacggatttcctgagtaatgatgtcaaatgctgtatgtgcagccataggtccacgacgttccatgttagtcttttcctgaactacaatgttacctttgataaagatttctcccttatccgggcatccaggacgtccccacatgatgttctcatcaaggtatccttctgaagaaccgaactcaccgatctgaactccgccttcgtcagttcctgtcagcatcataacaacgccgtcaagtactcttgttgcgccttcaccaaggattgcatcgccttcttttgtagcgattggctgaacatccatgattgtctctgagtatgtgtggtattggtcaggagtgatgatttcaagatggaaatctttaaccagttcctgatcagcaattacttctgcttcaattccttcacggatgtaaagagttgttccttcaatttttgtctctggtcctctcttaacctctgtgatcttaatgtgtcttcttgttaatgttcctactacttttgtttcttcaacaggtgcttctgctgttgctgtagctgctactgctgcaggtacttctgctactgcttctcctgttgctccaagagctccaaccgggatttcaagattgatgtcttttccttctccgatgtggatcttgagtgttcctccagctactgttgctgctgttgcaactggtgctgctggtgcagcttcctctgccggagcttcttcctctgcctcttctgctggagttgtaggtgcttttacaccatccagaacatcatttgttaatgggcaaagagaatcacaagtttttgtaagttttgcacccagtacttcttcgattgtaaggcatccgtccaggtttaataatcctgaatctaccagatcatcaaaaattgctggatcttcgagattagccggctcaattgtgataccagcttctgctctacagcacagtactgcaggatcatgagcatgtgcttttgctgtttcagctgtgattgacatattgtttccctccttgtttttgtttcatacattttccttgcggaatattgtagttaaaaaatatatatacagctgcgtccaacttccagaagaacctctcaattacttctgtcaggcaaaagaatcgggggtctcctacctcattgcacacaacggtaataccgataatattatgtttcattcaggttataattaaaaatcaatttcctgacttacttctttagaaaccttcaggcttctgtacagtggatgtccaactgttctcataacatggtctgtctgatggaataccttcagtcccatcttcggtccggatgccattacagtgtttgaacagtctgagcagttaccgatcagaatgtattcacatttgtctttcttgaactgaatattgttcttaacctgtccaggacagttaccaggtcttaagcacttcagtggtgctcccggtttgttttcaattgcctgtttacatttgcacatagatactactttggcattcatcttagaagcgatctcacgcatacgctcttcgcttccgccgcaggcacatacaagaattcccattgttgctccgtggagatccgggaactcgattgtaacgaggattgctcctgtcgtcttggttgttggtgcatctaatgtagtagactttcctgtgaaagctccacccatgatgatctctccatattttccgtcgattccgccggctttttcgatcatctctccaacgcttacaccaactggtacgtcgaagaatacgtgtgcttcatttccaccgtttaatttaccacggactgtcatgttcttgctgatacaaggtttcttttcatcaaccgcttcagcaatcttacagacagtttctacattgataacaacagatctagctgctgatggaagctgtgtagttgtgagtaataccccaagacactctcttactactgcacgttcctcacccatcgggtagatatcagccatcaggtgcatcttgatatcaggctcattctcaagggctttctgtaataccttgattgctttatgatgtttcttcttaatagcaataattgctttctttgcgtgagtgatttccatactatatttaataccacggattaatttatcactctgctcttcgatctgtcttgtgttgtgttccagtcccggttcgcattcagctgcatttacaagaatgtatccacaatccagtttgaagtctttcggaagctctgggttgatctcaggatcaagctcacccatcggagtttcttctaaattaatattaagttttactcctgtcgggaatccggctcctcccattcctacgattccggctgctttcaccagatcaagttttgatgattcatctgtgataccttctactgattcggtaactggaatgaattcatccggctgttcagcggccggctcgatgatgatgcggtcttctgtaatctctgttacttttccatacacgcttgaaaagatgttagctcccaggcctgttggtgtagcaatgagagtaccctttttcacctcagcaccaacttctacacatggtgcacaaggagcgccaacatgctggcgtaataacatctgtacatttcccatgacacacttctcctttttaatttttattttatctaagtcaaaacgaaaccatgcaagctcgtttacttattctgatttgattaatatagaaattttctatgaattatttttcgccatttttttaacagaaactgtctgttttttggcggaggcatgtgggaatcgaacccacccaggacgctcttaacgccctacactagttttgaagactaggaggcacaccagttacccaactacccccatgtgcttatataccatatcatatttgcccttaattttcaacacttttatttatttttataataccaaaaaagcattgacttttcaatgtatttcgtacataatgaaatcaacagattgaacaaaatactagaatacagtctatttgttaattttatatcgcaatatctgttaattttattatttttatttttcactcatagaaaaaggcactacgaaaatatagagattttcaatgtgtttttataaaaacttatagatgaattctataggatattataaggaggtaaggattatgaagttagaagcaaaagttaacttcgaccggtttgaagaagctcttcaggttgtagatgctcatacagccggtgagttctgccgtatggtcatcggaggatttcctgagccagaaggcagcacaatgatcgaaaagaaaaaatggatggaggaaaaatacgaccacgttcgtacagcattaatgctggagcctagaggacatcatgatatgttcggtgctttcctttgcgagccaatccacgaagaagcagatcttggggtaatcttcatggatacaggcggctacctgaacatgtgtggacactgtacaatcggagctgttacagtagccctcgaagctggtcttgttgaatgccacgaaggtgagaacgaagttgttctggatgctcctgcaggaatcatcagaacaaaagctcatgtaaaagacggaaaggtaacagatgtaactcttacaaacgtacctgcattcatttacaaagacaacttaacagttaatatcgacggagtagacattccttatactatttctttcggtggaagtttcttcgcactggttgatactacaaagcttgacattggcgaaatcaacgctaagacagttcctgcttatacagaactcggaatgaagattcgtgataaagtcaacgcagaagttaagatccagcatccaactctggacatcacagaagttgacctggttgaattctacggaccaacaccgaatccggatcaggctacaatgagaaacgttgttgtattcggagatgctcaggctgaccgttcaccttgcggaacaggtacaagtgccaaactcgctactcttcacggatggggcgaactcggaatcggcgaagaatttatttatgaaagtttcatgggaacacgcttcaaaggtgtgatcaaagaagaaactaagatcggtgattacgatgcagtaatcccaatgatcacaggaagtgcatatcttacaggtgttgctacttacttaattgactctacagatccattaaaatatggtttccttgtaggctaatgcatattcggggttgaattagattgcattatcatatatgataatagaagcggattcgtgtgatccgcttctattttttatacagcaaagaagggaatgatccgaatgccacgtaaacgcagatctacaaaaagccgaattgttaaagcagcctggaacctcttttacaaaaatggctacgaacagactaccgtagaagacatcatcaacgcttcaaaaacttcaaaaggtactttttatcattatttcaagggaaaagaagcacttttaaattcactttcttatctttttgaccagaaatacgaagaccttgctgcggtgattgatccgaatctttcttgttatgataaacttttatttttaaaccatgaattattttatatgatagaaaccagcgtcgatatacatctgctggcctacctctactcttcgcagctggttaccaaagataagaaatctttgtctgacaaaaaacgtatttatttcaaatggctgacagagattatggaggaaggtttaaaaaacggagaattcaaaaacaccagcaccgcttccgaactaatggaaatatatgccatgtatgagcgtgctcttctctatgactgggcccttttcaaaggcaaattctcactgaccgaacgtacagacaagttacttccacatgtattacagacatttgtggatggactttaatcgccatgtattcgaaagaagctgccagtttcccttatataaaaaaattaacaggcgttgaccgcagagatttctctgcagtcaacgcctgttctctttcagtccagattttccatacccttgttatgacctcttatacaaggcattcatgaacatcttcctgttcaatccctacctctttcatcacatcaaggatctgttctcggtctgtcagatccgcacaccaggaaagtccgcatcctgccgaaatcgctctcggtacaggaatcagtctgcctggtacatttctttccttgcataccttctccatcgccatcgcatcagacgtcgtatggaaagttacaacaagtttcattactttttttctcatctttactcaatcaccacttcgtagtaaccgtctttctccacagctgttgactttttccccttacttttggcaaatttttcaacattcatcttctgatgaggctctgtgacaagaattttcacaggtcctgtttctccttttaacgcttctgctgtcagcattaatggttccggacaagaaagacctcttgcatctacttctttcatatttaattccttctttcctagaatactatgtatttaagcatatttcaatcttattttgtttcttctctcttattcgtaaatgcgataataaagcaaatcacaatacagataatacatgcaatcttaccattcaatggtactgcacctgccactacttctttcgtctcaggattaagtgcagttccacttgccgcaagtccgaagttatggcacattgcagctcccacaaacattccgactacggttaccgccgaatcagaagatccctgtcccgcaaggatcaactgtcttaatgggcatcctcctgcaagtacagctgcgaatccaactgtgtacattccaagaatattccacagatgttcagaatgcgcaatgattccaggtgtattaaatccaagcacgaaacgtcctgttgcaagattaaatacaagcatcactacaaaaagtcccgcaatgacactgataagatcaaagtttttcatcaggataatatcccggatacttcctgcaaagcacattcttgatttctgtgcaaatgctccaaatacaagacctccgatcaaagatgcaataatcggtgcatgcatgcttcccggtcctgcctggctcgctttcagaagtgttgtacatgtagcaaggatcaaaatcgcaaccacgattgccggaagaaccgctccgttaactttgttagttacatgtgctcttccaagactgaatcccttctttaatgcaaatactcccgttgccactccaaggatgaagccaacgaaagctacccatgcattcagatcacctgccgacatacggattaccatacgcagagggcatcccaggaatacaagtgcaccgatcataatgatcacaccaagaataaaacggatcatcggcgatgatcccgccgttgagcgatattcttttgttgctattgaaatgataaatgccccaagtacaagaccaataatctccggtcttgcatactgtaccacttctgcctgatgcattcccattgctcccgccgtatcacggataaaacatgcaatacagaatgccatgttcgccggatttccaagtgttgcaaggcatgccgctacaataccacacacaacaccggccagtaccagttttttctttgaatctgataaattcatatgtgtttcctcctatactctcattttcttgcatttccccataactatatgcctgacatacttttttatgacgccttgtcacatatcacatattttacggttcttctgccagttcgcggatcgcccttatagccgtatccacttcttcctccgtgttgtaatgtgagaaactgaatctcacagccccctgttctaccgttccaagcgcctcgtgcataagcggtgcacaatgccctcccgatctggtagaaatatcatattccataagaagctcatcactcacttctgaagaatcataatcaccgatgttcagcgtcacgatcgcacaacgttctttctgactgtaatccccataaatcttaacgcccggaacatcttttaccccgttatagaaccgccacatcagattttcttcttttttgcggatattatcaattcctgttttttccagatatccaagtgccgcatgaagtccggcgattccatgtccgttcaaagtacctgcctccaaagccgtcggcatctgcaccggatgttctttgctatatgtctgtattccacttcctccggtctttaacggtctgatctgtattccttcttttacatatattccgcctgtcccctgaggtccaagaagtcctttgtgtcctgtaaaacataatatatctatatccatcttctgtacgtcaattggaaatactccggccgtctgtgatgcatccaccacaaagatcagtccgtgcttatgcgccatctttccaattactgccacatctacataattgccggtaagattcgatccattggtacagataatcatcttcgtattctcttttatcgctgcctccatcgcagctatatccggcattcctttctcgttacatcctataactgaaagttctgtgcctttcttctccatctcatataacggtcttaacaccgaattatgttccagaaccgttgtgatcacatgatctcccggatccagtattccttttatagcaatattcagactttccgtagaattcgatgtaaatgcaatctgccttgcattctctgcaccgaataattttgccagtccctccctggtatcataaataatcctggatgcactgagtgcagcttcactggccccgcgtcctgcattccccatcgaactcatcgcacttactaccgcatcgatcacttcctgtggtttgtgcattgttgtagctgcattgtccatatatatcatacttgtctcctcctaatgaccgcacatgattcaagttttattataaaaatattattccgttcattcaatactatttaatttctaagtaaattcatacctctttcatatgcttttagtatagtctattttcttcttcccgtctaatcgaaacattacataaacccacagcattcatagtaattatctataaatgttgtgggtttattctattatttagatctacagatcataaactgtaatctattcttctattccgtatacttcttttaccactttaacaaagcgctctgcactttttgatatctgataattcttattatacaccaggttaatgtcacgtccctgatctgcctttggaataggaaatgtcagaagatctcccgattttgtttcttcttccgccgcaagtctggatatgattgaaattcccattccttgttttaccgacttcttgatcgtctcctgattttcaatacttgcaatgatcttaagcttatccagattgattccggcattacggagctgttttccggcttcttttcttgtgccggatccttcttcccgcatgagcagacattccccactgatccagcttatatcttcaatattctgatgtaacacctgatatttctccgtattcggagtgatcactaccagttcatccttataaaacggaatatatttacagtgttttttctccagaaccgttccggtaaatcctacatctaccatatgatcaatgatcttggtcacaacctgactgctgtccgtttcaagaagctttacctgttctttcggataccgttcattgaacttcataagaatctccggaagcagatactgtgccggaattgtagatgccgcaattgtgatcagatgtttgctctcactttttcctgtttcaaatctttcctcgatctttttctgaagatcgatcatctgtcttgcgtaacggtacaattctttcccgtcatccgataattttacttcttttgtatttcttacgaaaagccttgcattcagttctttctccagtgacgaaatgtgtgcactgatggttggctgtgtcagaaacagctgttttgctgcctttgaaaaactacctccctctgctacctgaacgaaagcttctaattgttttaaattcattagtatgccaccctttcgctctctgctcccgttttcttggttaccttgatactgtccatatattccaggatcggttttgcactttttctgcttgtctcaaacatgtctctgacctgtgcgatcgtgatcagcggatcttctttcaaatgctctttgatcttctctttcgcagtctccatataagaggtcagcgtatacatttcatcatttatttttacaatctgtttttcttctaataagatattcaggatgtcatccatgatatcctgtggtacatccttacatgtaacctcggaatatcttgcaaagtcaaatcctgctttttcaaatgtatccagcatgatctttgacactttatcataaatcttgtctttccgtacttcatactccggagtacataagaattcatcgactcgtttcaatactccctgttcttcaaaaagcgtcagaatcttgtcgtatacatttggttttacctttttgaaatatgtggtctgtacctgtgccttcttaattccgtagcggtacggatacgtttcttcatattccttcaaagctttcagcaggatacgttctgcctctcttgcagaatcgctgtgccatacatacgtatctttccgcattggaaaggcatagatactgccctgctcttccagttctttcacatcctgctccacctcttccggcgaaagtgccgtaagcttggccagttccgtgactgtgatcagggtctctgcatgactcttcacatgcatttctataacatctgcggacgatccttcttccttgcgcttcagttcttcgatcacttccggctggaatcttctcttgatcttcggattcggctcaagaacaacacctccgccgatcgtctccattggtgaatagaaacgtactacgaatttgtctcctcttcttaccgcaacttcttcttccatacgaagctgtacataaccgctttctccaggtccgatctcttccttatccagaagtaccgcacggcagagcacttcactggttcctgtaaagaaatgcagacgtgtatgattcgtcaggattctcacagaagaatccagtacatttaactttacatccagaaggtcggtatttttcatactgttcggaggcgccagtacgcagcctctcttaatttcttttttcttcacatttgaaaggttgatcgccacacgttgtccggcgtaacactctttcttatcttctccgtgaacctgaatgtttcggatcttacattcttttccgaccggatacatctgaagtgtttcttctttcgtgatcgttccggacaccagtgttccggtgatgattgttccaaatccggaaagtgtaaatactctgtcgatcgggagacgcggaatagtatgaatatctttctgtaccacttcgtctctggtctgatgttcgatttcttttaccagatcatcaaggccggcacctgtcgctgccgatactttgacaagcggcgcatgttccaggaatgttccggaaagttcttcccttacatcctcttccatcatctccagccactcttcatctacgagatcacatttattcagcacaatgatactcttctcgattccgagaaggttcagaatatccatgtgctctcttgtctgcggcatgattccctcatccgccgcgatcaccaggagtaccagatccattccgacaactccggcaaccatgttattgatgaatttctcatgtcccggtacatcgatgattcccgcacggtctcctcccggcaggtcaaaatacgtaaaccctaagtcaatcgtaattcctcttcgctgttcttcttcccagcggtctgtatttcttccggtcagtgctttgatcagtgttgtcttaccatgatcaatgtgtccggccgttccgataataatattcttcatagccttcttttgcacctaccgttcttctttctttcctaataattctgcaagctctgctgcaatcatcttataatccttgcgttcgatcgttctgacatccagacagatactgtcattgatcgttctcggaatgatcgggatctccagatgacgcatcttctcttccatctctgcaacactcatgccatttggctggattgcaactgcacggctttccatccgctcaagtggaagggatccgccgccgatctgtgattcacaggataccatctgaatctttgcatccattccagtgtgacgcaagatacgcacaaagcttctggcttctttttcaatctcttctaaaggcgttgcgatcatacgcaataccgggatgttctgaacggctgtctcttctgacaggtattccatcagaaccatttccagtgctgccgccgtaaatttatcaatacgaagtgcacgggtaagctggttcttcttcatcatatcgatgtacttcttcttaccgatgataattcccgcctgtggtcccccaagaagcttgtcaccgctgaaacataccacatccgcaccatgtgcgatggattcctgtacggtcggctcatgtgtcagaccgtatttctccaagtcgatcagcacaccgcttccgagatcttccacaaccggaatctcatgttccttcgcaatcggtaccagttcatcaattcccacactttctgtaaatccaacaatacggtagttactggtgtgtaccttcagaagagctttcgtctcttctgtgattgcttcttcataatcctcataatgtgtcttgttcgtcgttccgacttccacgaggcttgcaccgctctgttccatcacatccggaatgcggaatttaccaccaatctcgatcagctccccgcgggaaacgattacttctccgccttttgccagagaacttaagatcagaagtaccgaagacgcattattattgaccgccatggcagcctctgcgccggttaatttacacagaagcttttcaaaatgcgaataacgttctcctcttcttcctgcttccagattgtattccagattggaatacccactgacgatctctgctgctttcatcatgtgttcgtaactgatcggtgcacgtccgagattcgtatgcaggatcgttccggttccgttgatcacctttttcatattcggtgtatgcattgccgcaacggcttttgctatattttcattcagtaatgcgatctggtgttttgctttttcttcatcatcgcatgttccgatatatgcacggagcttttccatctcactgtggatcgcttccattacactttcacggctgtaggcctctatcaatactttgattccttcatccgccagaagaatatctacttttgggatactccggtataatacattcttattcattatgtttctccattctgtcattcttttatgacttcatatctagaataaccggatcagcttatcactctttggtgcaactgttccgattacggaaacggttgtatccagtcctgatgctctgaagtctctcatcatattctcgtattctttaggcgaaacactgatgagaagtccgccggaagtctgtggatcatagagaagatctaagtatgtctcttctaccgaaccaacttccacctgattgatcgaatatctcttattcttataagctcctgccggaacaagacccatcttcgcataatcgtatgcatcctgaagatacgcaatgtcatgcacactgagttcaaatgtcacatcacttgccgatgccatctcaacacaatgtccaagcagtccaaatccagtgatatccgtacatgcggaaacatcatacttttccacaacctgcttgcctatcttattcaaggatgccatgaccgtctgtgcctcgcggattgccgatggcgatgccatctctgctttgatcgcagtattcacgataccacttccgatctgttttgtaagaatcaatatatctcccggtctgcagccgtagttcttaaagatcttatccgggtgaacgaatccggatacgcaaagaccgtatttcggttcatcatcctgtaccgaatgtcctccgactaatactgcacctgcttcttttactttgtctgcgcctcccgcaaggatatcgccgaggatcgccggatccaggcaattcgggaaacctacgatgttcagggctaccgccggttctcctcccatcgcccatacgtcactgagcgagttggccgcggcgatctgtccgaacatatatggatcatccacaatcggagtaaagaaatcaaccgtctgaatcatcgcaatatcatctgtcactttgtagatggcagcatcatcggaagtctcgattcctactattaaattgtcatcctcaaattttggcagcttactcagaacctgagcaagggtctccggaccaatcttggccgctcaacctgctgttttgcttaaactcgttaattttacatctgatttcattctttttactcctcctgtttttcatacctttcttcagaggcagtacagtcgatgaactgtcatgcagactcttttgtattcattatacatacgccgtagtacaagaaagccggaacccctgtatcttacttcaggaatccggctttttatccaggtatgtaactaatttatgatggtctgacgattcttcctgcttttgccatcgtttcaacaatactgtacatgttcgttactgtaccaactgcaagcttgtctttcagaccataataatccagacaggttccacatgtcatgatctctactccctgtgcttccagagatttcagatcttccagagaatcagaaccttctgtagtcaaagttgctcctccattatagaaaagcattgtctttggcagtgtatcaagctgtgtcactgcaaaaataaatcctttgatcagaacttttcctaattcatcatttccagatcccatacggtcagaagaaacgacaacaactgtattgtctcttgcatccggcgcacatactgcttcagctccatctgctgccggtgctccttccatttcaatcgtaactttatattcggcatcccccaatttttcagaagttacttttcctcctgagctagatgccatctttgttacattctgcactgcgatctcattatcaaccagaacttcaattgtctccggtcctgtcagtgcagccattgcctttttggttttaataaccgggattgggcaattgtctcccatagcattaactgtaatcataatgattccacctttctatcaccatttccacaatcaacacatatagattcattctatcatcatttatggaaaaggtaaatatataatttatagaattattatataaaagtctgaaaacgtctatccttagaatcctaccttcgggtatccattcccatactcttgtacctccagtatgtgatatgcaccgtcctcataatatgccggtttcataccaccttttttcagagcttgcataaactcttccattgtctttacttctttcggaaaccaggtcgcacacgcaccgactttctccggtacatgacagtcgctggatcccatcgtacacagtccgagttcctgtgcatatctagccgccttctggcacgcctctacagaagtgcttccatttaagacttccaggccgtccagacctttgactgtccttaagttctcttccaaacctctgttattattgcggaacggatgtgccgcaaagcagaagcctccctgtgcttttaccagatcaataaagtcctgcgcggaaattctctcatccggatattcttcaattccaaatgcaataatgtctccctgcagagaaaagaattcaattcctacaaagattgggaatcctgtcttcttcgaatattctgctgcatattctttcagtcccatatcatcatggtccgtgatgcagattgcaccgagacctttctctctggcaatttctaccatctcttctaattttaagaaactgtcttttgaacaggtcatttcgtgcatatgcgtatctacaaacatactttcccggctcctttgtttttattcatactaaacttttctcttacttttcattatataaataaccacaccgactttcaaatagggaatcttaatatgccgtcttatatatagatcgtatctatagtaacgttaaagacactgcctacggcagtgtcttctgcgtatcttagtcaagtccctgcaggacacgctgatcctgtctgttgctctcttttgtctttgtactcatatttaactcttcctgcttctccagacattcctgaattgcttcattcagtgacagcatcttctcatccagagtcgataccatctctgcacattctctcagatccctgctgatataatcaggagcatccccttcaaatttgtaataaatcttatgctccagacttgcccagaaatccattgcgatcgtacggatctgaatctctaccttagtatccacaacgctgtcagaaagaaaaataggtacggataccagcatatggtagctcttatatccactttcttttggattcttaatataatctttgatcgacaatactttcagatcgctttgattaccgatcatctccgccagccggtaaatatctgatgtaaaggaacagatcaggcggacccctgcgatatcattgatatactttaccatattctcgattgatatctcgtagccgtatctgcgtaacttctttacaatactttccggtgtcttgatcctagtcttaatatgttcaatcgggttgtatttatgcacatgttggaattcatcgttcaatatctccagctttgtccccacttcttttaacgctgaattatacaggaacatgatcgtcttccaactgtcgacatcctcatagttcttcatcgtattttccatataaatgttctctctcctctcttcgcgaagagttaaaccagcactgttaatattataccataagctgtactaatatgtcatatttttcacatttatttaagaaagattatgcatttataaactacaaaagaagccgtcatccgacagcttctctctatatcttttataatttctacttttagaattcaattccttctcttgccattaccttacggtcatatgggtgcttcaccttcatcatcatcgttgcataatctgcaagatccaacatatcctgcgatacttcatgccctgttaagataacctccagtccacgcggtttatgctccagaaaacttttgatcttctcctcacttaagacattcagatggatcgcacataatgcttcatccagcaccagtacatcaaaattcgtacagaacttcacgatctcatccagtgctttgttgttataatgacgcagctctgctttctcatccccgttcatccggcttacgaatttcacctgatcacgccccggaagacaggtgatccccggtactgcttccagaatctttctttcattcgatgaattgtccttcaggaactggaagaagagcacctgaagtccatatccggcggctctgactgcctggccgactgctgctgttgtctttcctttgccatctccgtaatacatatgaattcttcctgtgcccatcataacattctacctgctttctcctaaaaatctatgtaaaaattgaactcatttttattctattggacattataatcgtttaagcctgaaatgtaaatgcctggaaatctactagccgcagttttccaggcactctttacattatattatgaagttttattttatcctgtcatttttcgtacatgttttttacacacgataatttaaatataacactttaaaattccagcttcatatctcccatcttgatccagtctttctttctcatgaattctgaaacaccaagtgtcacaactgccggaagcacaatctggatcagcaagatcttgatcagcaccatttgtgcagactctgtctggatcatcgtctgccatgtcatgatctgtcccactaatcctgccgttcccataccggaaccggtcgcattgttcgtcatatggagtaccattgttcccaccggtccgaggattgcactcgatataatcgccggaagccagattaccggcttcttcacaatattcggaacctgcagcatcgaagttccgattccctgtgccaaaagtcctccgactttattttcacggtaacttgccacggcaaatcctaccatattacagcagcatccaaccgttgccgcacctgctgccagaccggacagattcaggattacaccaagtgctgctgaactgatcggcagtgtcaggatcattcccatcagtacagatacgataattcccatcaggaacggctgctgttctgttccccagttgatcagtgaaccaagccagctcatgaatcccgagatcggtggtccgatcaggaatcctaccagacatccacttccaatcgtcacaaccggagtcaccaggatatctaccttcgtctttccggataccatatgaccgaagaaaatacctacatatgcggcaataaatgcccccagcggttctcccggtccggcaaataccatggctccgtctacgaatacctttcctgccagaatactgcttgcaaatgcccctgccattccggcggttgctgccgatacgactaccaacggtgcttctttgaacttataggctactgccacaccgatacccgctccggtaagggatgctgcaagtttccctgcgataaagatcatctctccaatatttccacccataaatgttccaatctgctggatgatcgtgccgatgatcagtgttgcgaacagaccgtgcgccatagcacttaagccttcgataaatatgcggtctaatgctttctttactttttccatctttctctctcctgtatctcatttcctgttatattgactttgatgtttattacatatgtcttgtcacttgtaaagagtgtaccatacacatactgcaaaggcaaccattgtttttttcgtgtcaatttcccgcctttactttacttttgattccttgtatacttggaatatcgaattgtaatatttttcagattatccggtctgaaaatccaaatatatatactaacaggaggttttgctatgttccgtttatggggaaaagaatttaaagacaatcatatgctgcgtgacaccgtgatctgcgatgatacggacgacaccagaacacacaagatttttaatgcgctggattcgatctgttatgagttcgatctcagcaagccaatctggctggatcataatattgatgaattcaagcgacacgataagacaagattctatcaggataactttgtagattcgattgatttcgattatctggagattcatattattgaggaataaaaaaatcacagcccggaagttttcctcacgggctgtgtgactataattcttttttcaataattttatactgtctgacatagtacgtcattcaatgcatttctatatgcattccactcttcaatcattctttccaaatattttttcccattcggtgtaatacgataatatttacgtaatttcccgttaacttcctgattataacattccaaatatcctgactgctccattccgtgcaacattggatacaatgcacctactttaagttcaaaaatattatttgatctttttgccagagtatcaatcatctcataaccatacatatccttttccgacaaaagttttaaaaccaacattgctgaattaccagaaaccatgtttttattaactttcatgctttcactcctcactagcgttaacatactcactaactatttcataataccttaaccctaaccttttttcaacctgctgttactttatatctgaaccattttatttaaaattttttcataatatttttcatttgattctttctttatcagagaatctaatatcactccatcttttagaaaaaatgtttttttaccataacttgccattttaggatcatgtgttaccattactacagttttatttaatgtttcattaatgtgaaccaatgtctttatcacctgcaaagaagtattcgaatccagatttccggtcggctcatcagccagtatcaattctggattttctatcattgctctacaaatggctgttctttgtttttcacctcctgacaattcatatggatatttattcaataagctggctataccaaattccgcagctatttttttaacagatttaatgccttctttcaaatcattttcattcaaaatcaatggcagcataatattatcttttacagtgagactattcatcaaatagtaatcttggaatacgaacgcaatctccgttcttcgtatcctggcaagattttctccatagatttcctgtatgtcctttcctttatataatacagttcctttacttggctcactaagcattccaaggattttcaaaagtgtggtctttccacatcctgaacttcccataatacttatgaactctcctttatgaacttgaaaagatattccttttaaaacagaataaatattttcttttccttcatgcgttgtcgtattgtaatttttttcaagttttctgacatccaatataatatcactgctcattttgaatgctcctttcaatctgttttttaacgttattcgccataccatataccatgaaatggatgactattgtcaacacaacaactaccagtaagctttctcctatataacgtatcgtccaatatatgcttaaatccttatacaatatttttatcaaaaccataataaatgcaaatggaatactacttatacatgcaatctctgtggtaagtaatatttcccgattcagatgtcttttcatttttaccttgttcattcccattcgataaaagaatgtgtatttccatctcattttatttttatagcttgcaatattattgtacaaagtaaatataatacaaatagccaatgtgataatgttaattatcattgcacttacttttaacatatttgcttcttgttcttctacgatcagctcttttttctcataaatcagattaccatatttataatcaaaaaagttcacctgtgaatttttctctgcatatttatatatatcatttactacccggttataattttgaggaatattgattgcaactgttaaatcagaccctctggctgttttactgattctttcatattctgcatctgaaaatacaataatctcttcaaaaacctttccttttattccactttcttctaattgtctgcttttaaaattaccggttataattctgtttgtagtgccaacaatcttataatctcgtgtaaattgattaccgggcataacctgcatcgtatacacccagatatccgcatccgaatttcctatatacaatctcggttctttttttccgtaatctattccaagtgttccgtattccgctttatttcgttgatacacaacatatatttcatgattatgcaatttcagtttttcacccgtaagtttctgatattccgaagccgatattcctgtatgctctccatagtcacctgctgtaacccgtatatccggaatacatttcacttcaattccatatttcctttctaatttgttcaaaaaatctttgtccgttttatttgctccccataccagatcatacggataattttctttttgcacaatgggcagcgtatcaataatttcaaaggaaaacgtgaatataacaatatatataaacgctcctgctatatacgaaatattaatatgcctgtaaaaattgctacaccagtcatctatccagagaattttcttataatatccttttcctctttcaaaacgctttataaaataagcaccatagaaatataaaaaaagtaatattgtaataactgccagtaaggttggaatcgtattaccgcttttaccccagtatgtcataagggatataatcgtaattccagccatcataattgtcacaaagcacattttaatatttactattgtccgttgtcttgtctcgctttcatcactgacaagataatcaattcccagacacgagattatttgatcacatacaataaatcccagtccaaaaatcaaaaaactaataattaatgtaagtttcagcggggcttcaccatatcgaatatcaccttttatatttacaaaaaaatattctaaaataatctttaaagcttttgattcacaaattcctaacactattcctaatattatactgaatccaacaatacctagatattcgaacaaaacgaatctgtatttatgctttcttttcattccaaatacagttaatgttttgtatatagctgctcgttttcttatgtatccgctcaacagtaagatcagcaggaataacaataaaccatatggaataagaaactctttctctacttccaagatcaaatatgtcatttgagggatggttccagttgatatgtacgaaaggcagccacccactgctgtcgaaaagtatattaacgaaataatccaactacatcccaaaaccgttcgaatataatcattcttattttcttttaatatatttcgaaacaatctgttcatatttcttccaccatccctcatcatattataagaataatctatatactgcccaaaagataatacacattatttttattaaaaatgaaattcctgtcattccttctgcaatcattgactctttatgtcttgcacgtcccactgcacatataatattcaatactaaaaacatgcaacaacataccgcaccaacaacaattaatgtattaaccgctcctatgcctcccttctcgtctattaatctctgcaaatcagaatgcaacataatattaattctccacatgcacaatataattcccgcaatattaaatggaatatcaatcattaaaatagcatttcctaatttcttcataatttaatgcctccttactttttaacaacagaaagattgtaacatctattttcctaatattatctttatacttctcatctcctttccgattcaattgtgtatgttacaattacttcttttgtttttattatctattttgaatatatatcttttttcgatatatgtcaatattttaattatatatttttacattatatataacaatttaacactcatcatttgtacataattattatctttcctgctcttcctctatatacagaaaacctactacctgcacttctttcgaacatatgacaagaaaaaagaagatgtctagcaatctgccttacaccttcttctttcattgtaattttatattttatttattataaaaatcttattccctattcattcctgatcgccgcaagcgggctcagcttcattgcccgtttcgccgggaaatatcccgccagcactccgaccagcactgcaaataccatggacatcagcacaagccaccacggaatataagatatcgtgctgtctgttcccatcgacatagcgccgctgcttccaacaattatattaatggctgctgacattacgaagcttagaatatttccggcaattcctccgagaagacctataaacgctgcttccagcaggaacatttcccggatattcctaagactgcatccaagtaccttcatcacaccgatttcctttgtccgttcataaatggacatcatcatcgtatttgcaattccgattgcagctaccagtaatgacaccgcaccaatacctccgagcaccgcctgtacaatcgcgaactgactcttcatactgtccagatattccgcattggtctcaacattatatcccatattacggattacatcagcgacctcattcacgtgatctatatcgtctgctttcacttttaatgacgtataatagaagccttttaatgcctttccagctttggtcttcggctgtcccggaatgactttgcctgcatattctttccgcaataactgctttaaagtctccaggtcacaaaatacactgtcataattattggaatagtcatccaggccgccatttatcacaccgcttgcccttactacatatttttggacaggttttgtctgtccggttccggaatctgactggctccctgcacctgctgttccgtctgtactgtctccaaaggctgtgctgctgtcactattgtaattctctgtatccgtgatcatgaaaagagaatctttcatcagattgatattcgggactttcccggtatcataatatccgttgccgcttcctgtttcataaaaatcagtgatcacgccatttccgaatatcagctccagatgtcctgttccggtctttggaagcgttccatctccaagatccatatttagggatttcagaccttccggtgtcattccttgcaactggacctgcgccatataggagcctttcagcaggatcaccgaagtctcatagattggtgcagctaatttcacatgatccattttactgatcttttcaaccaactggtcatctatccttttttctgtctcctgtcctgatcccatactttctgtcgtcataccgtcactgttgtccgatccggtcacagtgatactggtcagacctcccgactgttccacttctttataaagggactgctgcataccaagtccgagtgagatcatcactacaatcgaagctgtaccgatcaacacaccaaggaccgtcagaaatgtacggagtttccttctccgcagactattgatgctcatcctcagaagatcgttccagttcatccaataactcctcctcttcaatctctgccagctgtttctttttgcgcttcttaagtattacgactgctgccaccactgcaatgaccactgctgcgattacaaccggaattacaggaaaacttttctgtgtctcctccggcatatcggaagctgccgcctcatcatcatccactttttctgtcacttccagattcagatctttcgtggttgttgaaatgtttcccgattcatcttcataactaagtgtcatcgttaccttcgccggaccatccgatattttctttccttccagcatggcatcaatcgaaccggttgcaccggattctatatttccgataaatacttccgactttttgatattctttccttcaaatgtagcttttacattatagagcttgatccgtcccagattataaagactacacatcacatttgcttcttcaccgacagcaacgctctgcggactgatctcaaaattgctgatttcaaatcttgcatcctgcttcaccggaatagagatacttgacgatccttctacctgtgtagcattcggatcttcatatttcatggaaagttccatgttgtatggcttctgaagaagatctgattttgcattcagttcgatactgatatcggctgttccattcggggcaatgctgtccagataaatggagcttgcaccggatgatggaaggaatgccggtgatgtcgtctgttcatcgctgccttctgtcggtgctgaaagatcgaacagcatattgctgactttcatcttggatgtatttttcagatggatcgttaacttgaaattactgcccgcacggacttctgccggatcggttgtaaatccggttacgatcacacgcggaacagaaccatttcccgaagctgcatctccatccgtacttccaccggcttctccgctgtaagctgcttctccgttactgtaaccgccggcatccggtgtctggtaagatgtgccagaaccactgcctgctccattgccttttcctgtatccttgccgtcatctgtatctttctgtaccggctttgccgtggtattcacatagaactgcttttctgcttcttcctgtccgtctgccgtaaccttgaattttaaagtatagcgtgaagtctgaacatcttctctctgagtaaaatcaaacttcacttcttttgagtttgattctccactttccagggttccaatgttctgctggtaactctgcatctctgttttgaatggccatacatcattgtcatctccaagatccggtgttaccgttacattattcatcggattctccgaatgattcgttacggtaaatgtccatgtcttcttttctcccgctttatatgtcagcaccttattgtcttttgactcgatcgtaattcctgttgcagcctgtaccatctgcggatgcagcatagttgtcatcatgatcactgccagaaaagcaacaatgattcttttcaagcaattatttcctgtctctttctgtattcgtttctgcatgtcttcctccctcttctttcccttttttccatcggttatcttctatcttaatgatcctgccgtcccggatatgaaataccctgtccgcataagttgccagatgatcatcatgtgtgaccatgaccagtgtcttcttctgctctctgaccacccgctgcatcagttccatgacttcttccgatgtatgggaatccagatttcctgtcggctcatcggcaaatataatatccggatctactaccagtgccctggcaactcccactctctgctgctgtccgcccgacatctggttcggcagatgcttcttatgctttccaagttttaccagatctaacatctcattggcttttcgtactcttacatctcttggaacgccgcggaaactaagcggcaatgctacattttccactgcattcaacgttcccatcagatgaaatgactgaaagatgaatcccacatgattccgccggaatgtcaccaattgttcttcatttaacttttcaatatgctttcccgcaatgatgacctctccctttgtcggtttttccagccccgccagcatattcagaagtgtagatttaccagaaccggatgttccgacaattgcacaaaactctccttcatatatctcaaaatccacaccatccagtgcgcgtacaaactcatcaccaacacggtacagcttgtatagattcctgacttcaattaccttcctcatactcctcctctctgtcgtttttcagacttttcagaatatggattcattttactataaaaatataaagacttcctcttataaattatgaagattttcttaatacctccgaccgttcagataatatttctcatttatgccgtttaaattcctgcgccatatcacacgtattatattttatacaattttcgctaagattttccgtgcatattatttcagaagtggtataattggtaggacaatttcaccaaagtaaagtggatatcttatgattcacaagatatagggaggaacacatgaagtttgtaagacaatttatgatcatcctggcgatctcattcgtcggagaactgttgcacgcattactgccgctcccggttccggccagcatctacggcctcgttcttatgctgatcggtttacagaccggtatacttccactcaatgcagtaaatgaagccggaggatttctgattgaaatcatgccaatgctttttatccctgccggagtcggacttatggtttcctggggtgctttaaagccagtcatcattccgatcagtattattatcgtcgttacaaccatccttgttatggccgtaagcggacgtattgcacagtttatcttaaagaaagaggacaaaaaacatgagtaaattattacaggattcagcatttttctgtctggcgatcagcctgatcggatatgagattggtatcattctcagacaaaaaacgaaacttgcgctttgtaatccactgctgatctccattgtatttgttattattattttgaaagttaccaatattaaatatgaagtgtatgaggacggctcgcagttactcagctatctgctgacaccttctacggtctgccttgcaattcctctgtatcagcagatgggactgctaaagaagaacatgaaagcaattcttgccggaattctctccggagtcttcacaagtcttgccggcgtgtgggtcttctcaacattatttcatctggataagcagatctatgcaacgttacttccgaagtcgattacaacagcaatcggaatgggtatttcggaagagcttggcggaatcgttaccattacagtagccgccatcattatcaccggtatcatcggaaatatgtttggtgatgtaatctgcagactgtgcggaatcagacatcctatcgcaacgggacttgcgatcggtaccgcaacgcatgccatgggaactgcaaaagctatggaaatcggtgagatcgaaggtgccatgagcagtctttctattgcggttgccggacttataacggttgtcggatcaactattttctatcaattatattaaaaatatgaatcagacatatggaggtaaatgattatggaaaaaacaattatctgcatcggacgtgaatatggaagcggtggacatgccatcggaaagattctggcaaaacgcaccggatatgaattctatgacaaagaccgtttcatcgcaatcgcaaaggaacgcggcttcgaaggtgaagtcgaagaatatctggaagagcagccgatgaacagcttactgtattctatcgctcttaactactccagaccgaagaaaaaacctttcccttttgaattggtagaagaactggctgccgaaaagccctgcatcattatcggacgttgcgccggttatctgacacacggacaggacaatgcattcagcgtattcgttcatgcggatatggagaaacgtatcgcaaccgttatggcacacgatcatatcaattctcgattaaaggccaaacgcaagattgaagagattgacgagaagcgcagtgctttccgtaaagaattcacagggcaagagtggggacagtcaaaatattataatctgtctgttgataccacacatctgacttttgatcaggctgcggatctgattctttattataagaaacttgcggaagaatcacatgaatagacacgaatctgcaaatctaactttataaatttctttatgaatcagactttctgtgctaaaatttttgtgacaagaattttagcacagaatttttatacccaatatacaagaaaagctgccagtggtaggttttctgtattaccatttatcataaagatacggatttgacataaggaggatttgacatgatcaaggtcattggtcttaatatcaaagtattaaaaaaagagcctttctccggctctcatcaggggatgcgcttcttcatgcgtgcagaagatgatacactgcatgtatgggtatatccggaaccgtggtgtttcgagaagacttccgatgatatgaagacagcaaaagattttccatttacccaggagggactggatgattcaatggaatggatcagccaggaattcgaaaatcggaaggattactggatgcagatggagaaggataagatgaagatgatattgcaggggcgcggggattcgtagatgggacgccgctgcggctgggatcttatgaatcccgccataaatatttaagctcgttacgctcgcgtgagatttctttttatatttgttttacctttgcgaatatgtatttcaggtatttgtgttcttcattcggatcgatgacgtttacgatactcaggctgtagatgtcggaatcgaattgttttgattcttttttcataaggtctttgatttcccggtatgtatctctgatatcgccgtcactctcccggcagactgctgccagatattcacctggttccatttccacgatatcttctttattcctgcatccttcttctgtaaaactaaatacatttttataggtataattttctctcagaaattgttctttatcgatagaagcacccatcggaaatgcctgaatacctggattatcacaacgtttcaggtgtctgcggatatctttttcaatctcgccggatgaggttgccggctttgatattacttcggtaaatataaaataccacgaaaccccaatctcacgaattaccggatgtccctgatctgcaatacggatctgatccagaatctgtctggttcctgcaatggtgcgaatcttacggtccagttcctgccgcataagaagcagtttgtcatactgctgttctacaaattcatcgaatcttatctcttctccgccaagcagatattctttgatatctccaaccgaacaatccagcccccggaatgtccgtataaaataatatgaactgatctgtgcataactatagtaacgatagccattgaccgggttcttcttcggcacaagaattccctgtcgttcataataccgtaaggtatctctggtggtctggcacatctttgcaaattcgcctgcggtgatacaatattcgccttttgcctgcatagctttcacttctttcttctcttaactttctgcaatcagcaatactttcttttataaatcaatttctttcttgttctcttgacatgggggttacacccagttttattctatcacaggattttcggtatgacactgcattttccgcaaatcactgaacttaatcactatttagtattttttgaattttagacgaaacgcaaataccgttaaaatttcggaaatacagcatacacaatggaggtctctcatgaatattttaaagaaaatatactgccgcatttttcaaacttgttttcgtatcgcactccctgttcttccttacagagaaccggaactgatcgacggattcaaacacgtcccggaagtcctgaaaaaacatcacatttcccatatcctgctcgtcaccgatccgggggtctacaaactcgggcttacaaaacctttggaaaaacagcttttaaaatctgaaatttcatgtacaatatataaagatacagttgcaaatccgacttctgccaatatagaagaagccaaagatctttatctggcacacggatgtcaggcacttctggctttcggtggcggctcttccatggactgtgccaaagcagtcggtgcaagacttgcccgcccgaacaaaccgctggctaagatggaaggtatcttaaagatctggcataagcttccacttctgatcgcagttccgacaactgccggaaccggaagtgaaaccacgcttgcagctgtcatcactgatgcagatacacatcacaaatatgcaattaacgattttaatctgattccggattatgcggttctggagccgtccgttacgtatggacttccgccgcagcttacggcaactacgggaatggatgcgctgacacatgcgatcgaggcttatattggtcgttcaactacgaagcagacccgcgccgcatcgatcgaagcgatccagctgatcttcgataacctgcagactgcatataaaaatggaaatgataaaactgcaagacgtaacatgctccgcgcctcttatctcgccggaacagcatttaccaagagttatgtcggatatgtacacgctgtagctcacagtctcggcggatgctacggtatcccgcacggacttgccaattccgtactccttccgatcgtactgaaagcgtatggaactgctgcacataagaaactggccagacttgcacgaatcaccggcatttctgattcgaaacttgatgcagttgcagccgaagaattcatcaaccacatccgcagcatgaacatttccatgaatatcccggagaccctggacggtatccgtaatgaagatattccaaagcttgcctgttatgcggacaaagaagccaacccgctctacccggtacctgcgttatggggacctgagaaactggaacagatgtatcatcttgtacaggaggtaagtgaacatgacagaaacagaaattcagaacatcctggaaaagcagcataaatttttccagacaggccagacactgcctgtaaattatcgtatagaacaactcaaaaaattaaaagattccatcatccggcatgaaccggacctgaaccttgccttaaaagctgacctcggaaaaagcgagactgaaagctatatgtgtgaggtaggactcactctttcagaacttagctggatgttgaagcacatcaagaagctgacgaaggagaaatgggttccgacgccattggcacagtttgccgccaaaagcttccgctcgccttcgccttacggaacagttctcatcatgagtccgtggaactacccggttcttctgacactggaaccactgattgacgcactggcagccggcaataccgctgttgttaaaccaagcgcttatgcaccagccaccagccgtgtcatgcaggagatcatcgaagaatgcttctccgaagaatatgttgctgtcgtaaccggcggacgtgcggaaaatcaggctcttttgaaccagcgttttgataagatcttcttcaccggcggaaagacggtcggacgcgaagtcttaagacatgcagccgaatacctaacaccggtcacactggagcttggtggcaaaagcccatgtatcgtggattccacagccaagattccacttgccgcaagacgtatcgtttttggaaaatacttaaactgcggacagacctgtgttgctccggattatatcctctgcgacaaagccattcgtgaccagttgatcgatgcaatcaaatccgagatccgccgtcagttcggcaaacacccgttggaaaatccaagttacggtaaaattatcaaccggaagcatttccagcgtctgcagggactgatcgattcatcgaaagtaataatcggcgggcagtccgatgccaagattttacgcatcgcacctaccgttatgaaaaatgtcacctgggatgatgccattatgggcgaagaaatcttcggaccgattcttccaattctgacttacgaatcactggatgaagccatccagaccgtggaatcccatccacatccgctggcactgtatttcttcagtgaagacaaagctgctcagaagaaagtccttgaccgctgtcacttcggcggtggctgtatcaacgataccatcatccatcttgccaccagcgccatgccgttcggtggtgtcggcgaaagcggcatgggcggatatcacggacaggccggatttgatgagtttacacattacagaagtattgtggataagaagacgtggatggatctgccggtgcggtatcagaggtataataagtttaagaggaagatgctgcggatgtttttaaaataattttctatttaatgcatcatggcggctgtcaccgaccggaataaaactacaaagtcccaaccatgagtccgtatgcacaggctgggaccttgtagttttattcctgaggtttcgcatgccataataattaaacagaatgtatgatggaatgtgtgcatttgatctgctgccgtacagttaccctaagaaacttcagaaattcgggatcaagtgcaaaatgtccaataagatccggccttttgtgtctacaatccagaataaccgcgatcatagaaaaatctgtgtgatcgatgggcagacagggtatgtaggtggtgtgaatctggctgatgaatatatcaatgaaaaagaacgattcggtcactggaaagatacagctgttctgttaagaggagatgcggtccagagcctgacaatgatattcctgcagatgtgggatgtagatatgcgtggtgttgagccttatggaaaatatcttacaaaaaaagcggaatcactgaatgacagactgggatacgtgatcccatatgcggacagtccgtttgaccatgagaacgtaggagaagaggtgtatttccatatcctgaatcatgcgaagaagtatgtgcatattatgactccgtatctgatactggataatgaaatgctgacaacacttatacgtgcagccaaaagtggtattgaagtgatcatcatcatgccgcatattccggataaatggtatgcattcgcggtagcaaagacatattataaagaattgattgaaggcggagtgcagatctatgagtatgcacctggatttgtacatgcgaaagtatttgtatctgatgatgatacggcaacagtaggcagtatcaatctggatttccggagtctctatctgcattttgaaaacggagtatttatttatgataatccggaggttcagaaagtggaagaagacttccagaataccctggcaaaatgtcacaaagtgacagtgaccgaggtgagaaacagaggagtttttatgaaggtagccgggcaggtgttaagactggttgcgcctttaatgtaaagaatacaggaaatcatatgtattttctgtaaaaatattattgaaccaagataaaatgtatagtataatgcttaaggcggtttgattagactcgctaaagtagactgataagtcatgttaataacgcaggaggaatggatatggttaaagcagtagtcggtgccaactggggcgacgaaggaaaaggtaagattacagatatgctggctgagcaggcagatatcatcgtaagattccagggaggcgcgaatgcaggtcatacaattatcaatgattatggaaaatttgcattacacacacttccatcaggagtattttacggtcatacaaccagtattatcggaaatggtgtagcactggatgtaccggtgttattcaaggaagtgcagtctattatcgatcagggagttccgatgccgaagattctggtatctgaccgtgctcagatggtaatgtcttatcataagaattttgatgcatacgaagaagagagactgggaggaaaatctttcggttctacaaaatctggtattgcaccattttattcagacaaatatgcaaagattggattccaggtcagtgaattatttgatgatgaactgttaaaagagaaagttgtccgtgtggcagaacagaagaatgtattactggagcacctttatcataaaccattgatcaatcctgatgatttatataatgaacttcaagaatataaaaagatgatcgaaccattcgtatgtgatacatctcttttcctgaacaatgcaatcaaagaaggaaaagaagtattattagaaggtcagcttggatcactgaaagatccggatcacggaatctatccgatggttacttcatcttctacattagcaggatatggagcaatcggagcaggaatccctccatatgagatcaagaagatcgtaactgtatgtaaagcatactcaagcgcagtaggagcaggagcgttcgtaagcgagatcttcggtgatgaagcagatgaattaagacgccgtggtggtgacggtggagaattcggagcaacaacaggacgtccgagaagaatgggatggtttgactgtgtagcttctaagtatggatgcagaatgcagggaagtacagatgttgcatttacagtattagatgtacttggatacctggacgagatcccggtatgtgtaggatacgatatcgatggagaagtaacaacagacttcccgaccacacatctgttagagaaggcaaaaccggttcttaagaaacttccgggatggaagagtgatatccgaggaattaagaaatacgaagatcttccggaaaactgcagaaactacattgagtttgtagaagagcagatcggatacccaattacaatggtatcgaatggtccggaaagacatgatatcatttacagagagtcaaaactttccaaataagataaaatatttcgaatcatgagatgaaaaacagggataaagcaggccatgtgtcttttgaagacaggagagctgctctatctctgttttttaataccagagtatgaaagagaagttgccggtggcaagttctgtagattgttatgttttccttaagaaatttcttatgctttattcagattttttccataatgttgacacattctatgcatataatgaaaccatcgtaaatataataataacgtcggtgtaatcagacaccagagacgcaagaggggataaaaataatcaagatggaggtatgcactatgaatacgagagactggacaaaagaggaagcagaagtgatttcaatggaagaataccttgctaagagaaagaagatcagagaagatgaaagaaaacataagaaaaaaggatcagacgatcgcgaagaaagtctgataccctttgagttttatatggtatcatcgcttgcctggtcatgagactgtgacaacttagatacatcatctgagctgtggctgtgaaagctgtcagctgaatcatcagatggagtattatgccgggtaagcttgaataccagcatataaccatagagaagtaccggaagcacaatcgtacatgcaatagaggcccagagaaggtcgatggaatgcggactcccgatcagggcaaatattaatgtactgagatacataccaaataataaaatggcggcagcaagtgccagaatacgttttgcatttttcataataatcatcctttacaatgaatcaagactttagtatattatatagagagcagtgaaaaattgcaaatgaatatcgtacaaaggagtatagaaatatgagtacattatatcagcagtggcaggacctcgcttatgatgaaactgcagacagaagccagttagaaaaattctggggaacttatttccagattgagaaagaaatttatgaaaagcttctttctaatccggatgaagttgtaaaaggaacagtaaaagaattggctgagaaattcggacaggaagttctgacaatgatcggtttcctggatggtatcaatgaaagtcttctgatcgagatcgatcttgatacagtggaagaagatacagtagtaagtcttgcatttgacaaggaaagactgtataagaatatggtagcggcaaaagctgactggctgtatgaacttccacagtggaaagagattttctcagaagaagaactgaagaaattctacaaagaacagaaggaatctacaacaatccgcaaacctaaaaagatcggaagaaatgatccatgcccgtgcggatcaggaaaaaaatataaaaaatgctgtggcagataatatttctggttacaggtatcctgagtctcatttattacagtgagatctgtatcgcactgaaaaaatgggactctactttttccagattctggctggcgaccggaatagtgggaattgcagggagtgcgctgatccgtttatatggaatgccgtgtatcgtagaagcaatgattggtatttcggtatgttttcttctgatcgcagagataaagatcataaaaggaatgcacagaaaaccttcgggaaaaagaaaagaacactttgaagaagacacaaaaacaggatccgctacaagatggatcattgtactgggagcgcaggtaagaggccggaagattaccgattcactgaaacgaagactggactgcgcgtcagagtatctgaaagagcatccggatgtgcatgtgatcgtctccggaggacagggaaaagatgaagaagtaacagaagcgtatgcaatggcacgttatctggagtgtgaagggcttgaccgcaggcgtattgtgcaggaggatgtgtcggtaaacacactggaaaatctgaagttttccagaaaccttattgcagatgtagatacaccggtaggaattgtctcgaataatttccatgtatatcgagggtgtgtatatgcaaaacgtgcaggatttaaggagccgtttccgataccggcaagctgccatccattattattcccaaattattttgtgcgggaatgttttgcggtctggaaactgtggctgaaaaaatattgacaaagcaaaatgccgtgttataatgaaaatgtatgagaaaacacgttgaagagaagagtaggctgggaaagaaatgccagagagagaagccacgggctgaaagcttcttattttggaaccttctgaaaactacctctgagtggctgcaaaacagtccggtgattccgttatcgtcataattaagaggttctggcataaaagtcttggtgaataatatagagactgtgaagtgtcagttcaaacagggtggaaccgcgagataactcgtcccttacagtgattatctgtaaggggctttttttttcgccacgtgttcgtaaggagtggccagtggcaggtcctgtagatgccatgcgtttagaaaaaagcagcagattacggatgattgctgaacgggcaggaaagaagatacatgcccgaggataggatataaaaataaaaagagaggacatgagaattatgaaaattacattaaaagatggatctttcaaagagtatgaaggaagtatgtcagtactggatatcacaaaagatatcagcgaaggtctggcaagagtggcgacttctgcaagagttaatggtgaagtagtagatctcagacacgttgtaagcgaagattgtgaactggagattcttacatttgataatgaagaaggaaagggtgcattctggcatacaacatctcacatcatggcacaggcgatcaaacgtctgtatccagatacaaagcttgcaatcggaccatcaatcgagaatggattctactatgatgtagaccgcgagacaccatttgtagcagaagatctggaaaagattgaaaaagagatgaagaagatcgtcaaagaggctcttccgattgaaagatttacaaagacaagagaagaagcaatcgcatatttcaaagaaaaagacgaaccatataaagtagagttgatcgaagatctcccggaaggagaagagattagcttttatcagcagggagaatttgttgatttatgtgcaggaccacacctgatgacaacaaagcctgtaaaagcattcaagcttacaagccttgcaggtgcttactggagaggcagcgaaaagaacaagatgcttacaagaatctacggtatctcttatccgaagaaagcactgttagacgaatatctgaccatgcttgaagaagcgaaaagacgtgaccacagaaaacttggtaaagaacttggacttttcatgatgtgcgaagaaggtcctggattcccgttcttccttccaaagggaatggttcttaagaatacactgcttgactactggagagaacttcacaaaaaagcaggttatgtagaagtatctacaccaattatcttaagcagacacctctgggagacatccggacactgggatcactataaagagaatatgtacacaacacagatcgatggagaggactttgcaattaagccaatgaactgtccgggtggaatgcttgtatacaaagcagaaccgcgttcatataaagatcttccgcttcgtgtcggagaactcggattggttcaccgtcatgaaaaatcaggacagttacatggtctgatgcgtgtacgctgtttcacacaggatgatgcacatatcttcatgatgccggaacagatccgtgacgagattaaaggtgttgtagctctgatcgatgaggtatatcagctgtttggattcaaatatcacgtagaactttctacacgtccggaagacagcatgggaagtgatgaagactgggaacttgcaacagaaggtcttcgtggtgcgcttaatgaccttggtcttgactatgtggtaaatgaaggagacggagcattctacggaccgaagatcgacttccatctgacagactctatcggaagaacatggcagtgcggaactatccagctggatatgcagcttccacagagattcgaactggaatacacaggagcagatggtgagaagcaccgtccgatcatgatccaccgtgtagcatttggatctatcgagagatttatcggaatcctgatcgagcatttcgcaggagcattccctacatggcttgcaccggtacaggttaaggtacttccaatctcagataaacatctggaatatggacagaaagtactggatacattgaatgcggcaggtatccgtgcagaaatcgatacacgtgcagagaagatcggatataagatccgtgaggctcagatgcagaagattccttatatgcttgtagtaggagcaaaagaagaggaagaaaatctggtatctgtaagaagcagattcgcaggagacgaaggacagaagagcctggatgagttcgtagcatctgttacagaagagattgcaacaagagcaagacgtgaagtcgtaaaagaagaaaactaatttagttttacaaatgtataaaaaataaagagaactggcataatatatcttgaagtttgaaaggaggatatattatgccagatttaagatgtaccgtacagacttgtacacacaaccagaattattactgtaatcttgacagtatcgtagtaggaggaaattccgcaaaaaaagcagatgagacaagctgtgacagttttgaagagcgaaaaggtgaaaactcctattcgaatgcatactcggacatggcgggaaaagaagcatctgccaagagtgacgtggattgtaaggcaacagactgtatgtataacaaagaatgtcagtgtcatgcaggaaagatcagtgtagaaggcgggaatgcctgtcactgtcaagagacggaatgcgcgacgttcaaatgtggatgtgcgtaatctttggaagaaaagatgcgcaggtcatatgtatacgatcagtgaataaaaggtacagataaagaaaaaagtgtgaaaaaccggaataaagcttaagaataagtttttactccggtttttgtcgtatcaaagtatgttgacgtagatttacagtgagggtataatagctttatatgccaaaactggcagggaagaagaggatttcatgaacaaagaagagaatacatactataaaaacagtcccaagtttggcagaaaaggaccgtccaaattaagacagcaatttaaccgtggaatgacctattttctggtaattgttgcctgtattctggtttattttgccatgctgagggtagaagcaatttcgaatacactgtcaaagatcctggcgattttaaagcctgtattgtatggatgcgggattgcgtatcttctgaatccaatcgtgaagagcgtagatgcatatctggtgccagtgctggaaaagcacatgaagaagaaagaaaaagcgaagaaggtttccagaagtataggagtgatcgtggcgctggttatattgattacggttgtatcgacattgatcaatatgctgataccggaactgatcacaagtatccgtaatctgatatttacactgccggcgcagatcaatcagctggtaaaagagatcaataatatacagttggatgattcgaccacgacagcagtattgaaaaatgcaatgaacgaagcttcggcaagtcttcagaagtggatgcgtacggatctgttggataaggtgaatgaagtgatgacgcatctgacggttggtctgtatacattgattatggaaatgttccatgcggtgatcggagtgatcgtatcggtgtacattttatttggaaaagagacgttcattaatcagagtaaaaaagcagcttatgcgatttttcctgcagaacgtgcaaacctgttgattcatatcgcagtaaagacgaatgagatattcggtggatttatcattggaaagatgatagattcgatcattatcggaattttatgctttattggtacatcgatcttaaagatgccgtatgcaatgcttgtcagtgtaattgtaggggtgaccaatgtgattccgttcttcggaccgtatattggagcaatcccgagtgctgtcctgattgcgctggcagatccgatgaaagggatatatttcctgatatttatactgttgttacagcagtttgacggaaatatcctgggaccaaagatccttggcaattctacgggactgtctgcattctgggtaatcgtatcaatccttcttgggggcggattgttcggaattcttggtatgttgtttggagtgccgacgtttgcggttgtctattatattataaaactccttctggataaccagctggagaaaaagaaactgccgacagattcggactgctataacggggacagttatgtagacaatgacggtacatattttcaaaaaagagatgacggggcagaaacagaagaacagaaaatagaaaaaaataaagaagaaaaaggggaataagattatgccgatcagagtgcagaatgatctcccggtcaaggagatcttagagagtgaaaatatatttgtaatggatgaacaccgtgcaacacatcaggatatccgtccgatcaaaattggacttttgaacctgatgccgttaaaagaagagacagaactgcagatattacgttcactgtctaatacaccacttcaggtagatgtgacatttgttgcagtagcttcacatcagtcaaagaatacgtcaaagagtcatttgaacaaattctatcagacgtttgatgaaatcaaagaccggaaattcgacggattcatcatcaccggggcaccggtagaacagatgccgttcgaagaagtggattactgggacgaactgacacgcattatggactggacaaagacaaatgtcgtatcaacattgcatctttgctggggagctcaggcaggaatgtattatcattatggaatcgataaagtccagctggataagaaggcgttcggtctgttctggcacaaagtgctaaaccgtaagattccattggtacgtgggtttgatgatgtattcctggcaccacattcccgtcacacagagactccactggataaagtgcgcgcagataagagaatcacgattctggcagaatcggatgaagtgggtctcttccttgcgatggcacagaatggacgtcagatattcgtgatgggacatccggaatatgatcgtgtgacactggatggagagtataagcgcgataagagcaagggactgccgattgaacttccgaagaattattatcaggacgatgatccggagaatgggccattacttacatggagagcaacagctaataatttatatactaattggttaaattattacgtgtatcaggctacgccatatgaccttgaaggaacaccggattttacttggaaatagggcgttttcagggaattgtgagtcaggttgaagaaatgaaatgacagcaggaaaagcagacggtattaaataaggattagccagaaagcagaaaataccaaggcaggaaccaagattaacttgaagttcattacacagagcgttataatatcaaaaaaatattgtaggcaaaagactccgaggatggaatatccccggagtctttttgcatataaaggaataaggaggaaaagagggtatggagttattgaatgcaatcgtcataaccgtaaatggagtcgtctggggatggccaatgatcattctgctgcttggtacacatatttatatgacagccaagacaggatttatccagcgttttaccattacaaaaggaatcagactgtctgtggaaaaagatacgaagaaatatattcataatctggatgcaaaagatgacacaccggtaccggtagtgaaatgataaacaagtaaaaaacttcttgacaaaacaactttgatacagtaaagtataaccataacaaagcaaaaccgttgagaaagaggagtagcttatacaatgacatccaagagagcagcaggtggtgtgattgctgtatgaagttgataagtgaatggactttcgagggcagtctgaaatcaagaatttatgaatatatgtaattcaagagagtatggcttgtcgggaaccgaacccgttatcaatcaggagtgtatgttagtacatgagaaagtggacgattcgtcaatttgagtggtaccgcgataataatagattttattaccgcctcaaaccttttggtttggggcggtttttttttatcaaaaaaaggtatgacggacgttatcgatgaaagattttctctcctaacagttacagagggctggcaattgcaatctgtagacaacaacaatatttcatacaggaaaaggagaaaaaagattatgaaaaagaaaatggtaacagtattattaacagcagcaatggtaacagcaatggcagcaggatgtggcaaatcatccgattccggaagtgacaagaaagagtcttataccatcggaattgagcagtttgcagagcatggttctcttgataactgcagagaaggtttcttaaaaggtctggaggacgaaggaatcaaagaaggcgacaacctgacagtaaaatataaaaatgcagcggcagatatgggaactgcaaaacagatttccgacagtctggtatctgataaagtagatctggtatgtgcgatcgcaacaccaagtgcacagagtgcatacaatgcagcaatgaaagcagatatcccggttatctacactgcagttacagatcctgtagcagcagaacttgcagataaagatggaaagccagtaggagaagtaaccggaacatctgacaaacttccggtagaagaacagcttaagatgatccgcaagatgcttccggatgcaaagaagattggtatcatgtacacaacaagcgaagcaaactctgtatcagcaattgaagaatataagagtctggttaagaaatatgatttcgaacttgtagaaaaaggaatcacaacaacggcagatgtatcccttgcggcagatgatctgttaagcaaagtagactgcatcaccaacctgacagacaacaccgtagttgcatctcttccgactatcctggataaggcaaatgaaaagaaaatcccggtattcggaagtgaaattgaacaggtaaagatcggatgtcttgcagcagaaggaattgattatatcgctcttggaaaacagacaggtaagatggcagcaaaagtattaaaaggcgaagcaaaggcttctgaacagaactttgagacaatcacagagcctggattctatgtaaataacaaagtagcagagaatcttggaattacggttccggatgatcttgcaaataatgcagtagaaagttttgacgagattacagcagaataagccggaaagggcaaagtacaaaaagagaaacgtctgagacagacaaaaattgggaggcattttttcatgaatttcatcacatcgatattagaacagggtctgatctatgggatcctggcactggggatttatatcacatacaaaatattggactttccggatcttacggtggatggaagtttccctctgggggcagcaatcacggctgcccttcttacaagaggaatgaatccatacatcatactgatcctttcgtttcttgcaggggcagtcgcaggaatctgcaccggactgatccatgtgaaatgtaaggtcagagatcttctctcgggaatcattatgatgacagcactgtggacgatcaatctttacatagcgggaacggccaatgtgccgttgttttcacagaagactattttcaaaaatgacctgatggataagatcatcccggatgcacttgtaccgtattcaacattgatcattatcctggtgctggcagtgatctgtaaagtattcctggacctttatctgaatacaaagtccggatttctgttaagagccgttggtgacaatgacgtactggtagtgtctcttgcaaaagataaaggcaatatcaagatccttggacttgcaatctcaaacggcctggtagcgttggccggatgtgtgtttgcacaggaggagcgagtatttgaaatttcaatgggaaccggagcaatggtcatcggccttgcaagtgtgatcattggaaccagcattttccgtaaactgacgctgctgcgtacgacaacagcggtactgatcggttcaatcatttataaagcctgtgtggcaattgcactccgtaattttgatccgcaggcaatgaaactggtaacagcagtcctgtttctgattgtacttatcatcagtatggagagaaagaagaaggtgaacaccaatgcttgagttaaaaggaattcataaatattacaatccgggaaccgtaaatgagatgtgtctgttccagaattttaacctgacgatcgacaacggggagttcgtatctgttgtgggaagtaacggttccggaaagacatcgatgttaaatattatctgtggaagtattccggtagaaggcggacagatcctgatcaacggatcggatattacaaagcagaaagaatttaaaaggaaccagagaatcggccgtgtctatcagaatcccgcaatgggaacctgcccgagcatgaccattctggaaaatatgtcgctggcagacaataaaggaaaggtattcggcctttccagaggaacgaacaagtcaagaattgagtattacagagaacagttaagccagctcggactcggtctggaagataagatggacgtcaaagtcggtgcattatccggcggacagcgtcaggcaatggcacttctgatgtctaccatgacaccgatcgagttcctgatcctggatgaacatacggcggcactggatccgaagaccgctgaactgatcatggagctgaccgataagatcgtaaaagaaaagaatcttacaacgatcatggttacacataacttaagatatgcgatcgaatatggcaaccgtcttgtgatgatgcatcagggaaatgcgatcctggataaaaaaggagaagaaaaagacaagatgtcggtagatgatatcctggcgttatttaatgaaatcagtattgagtgtggcaactaaaagatgttatactgaatatgccagtaaaaagcacagctttaaaggctgtgctttcttttgtggctgccggatacaaaagagaaggatccggtgataaaaaagaaatgtataaaaatacaaagaatataagaaagaggacatacacatggcaaaaagaattgcgaaatttgaaaaggtaagttttgaacagtttaaaggaggatacacagatgcgatcggagaagcttccgatgagcagatcagggaagtctatgattccttaaaacttccaaaacgcgcaacaaaaggatccgcaggatatgatttttatgcgccggcagccatcactttaaaaccgggagagacggcgaagattccaaccggaatccgtgcgaagatggaagataactgggtgcttcagtgctatccaagaagcggtctgggattcaaattccgcctgcagttgaataatacagtaggaatcatcgacagcgattattattattcagataatgaggggcatattttcgcaaagatcaccaatgatacaaatgaagggaaaacagtggaaattccggcaggaacgggatttatgcagggaatcttcatggaatatggaattacggtagatgatgaagtggaagagataaggaacggtggattcggcagcacgacaaaatagccggaaatgacggattctgcatgaaatattaagaaccggggcatactggaaagtatagtctatgtatataagaggtgagaaggacatgacgcgccaggaaatcccggtttttaagacaagagaagaaaatgtagcatatatgaatgaaacacttccaatccaggaaagctttgacctcattcaaagagatctgctgatcggaggaagggtttcttctttttattttgtaaatggttttacgagcgaagagacgatgttgaagatcatggatgcacttctgaaggtgaaggaagaagagatgccagaggatgtgtgggagtttgccaacgcatgcattccatacgttgaggttgaagtgttgtttgattttgatcagatactgaaaagcctgctgtctggtgaaacgtgtgtgttcattgatggataccgggcatgtattgtgatcgactgcaggacatatccggtaagaagtgtggaagaaccggataaagataagtccctccgaggttccagagacggtttcgtagagacactcgtatataatacggcaatgatgagaagaagaatccgtcatccggcgctgatcatggagatgatggaagtcggggacagttccagaacggatgtggcactctgctacatgggagacagggtagacaaggaactgttgaaaaatgtacgtgacaagatccggagtgtggatacggatgatctgcggatgaaccagcagagtctggcggaatgtctgttcagacggaaatggtacaatccattcccgaagttcaagttcaccgagcgtccggacacggcatcggcatgtcttctggagggaaaagtcgtaattctggtagacaattcaccatctgcgatgatacttccgacatcgatcttcgacatgatcgaagaggccaatgattattattttccgacactgaccagtgtctatctgaaaatatccagaacactgatcaatctgatgacgatatttctgacgccggtcttcctgctttttatgcagaacctgaactggctgccgaaagtatttgcctttgtggcggtgaaggatacagtgaatataccgttgatctatcagcttttgatgctggaagtagcgatcgatggtctgaggcttgcggcactgaatacgccaagtatgttaagtactccgctcagtgtgatcgcaggtctggttatgggagaattttcggtagcatcggggtggtttaacagcgaagtcatgttatacatggcctttgtggcagtagccaattatacacagccgaattttgaacttggttatgcgttaaaattcatgcgtctggcattactggtattgaccgcattatttaattggtggggattcgcactgggctgtattctggtggtgtgcagtatctgctttaataagacgctttccggaagaagttatctgcatgtgagcctgaaataatgtaatgtgaaaagcggcaatgaatgtgtacacaaaaataagaaaatgatataataatttttatactaaagtgagtatataagagaacaagtatacaaaagaatatgcaagagaaaggcagcgatacaaatgaatcacagagacgaaagactcggaagtgcaccgctggggaaactgatgttttctctggcggttccttctgtggcggcacagcttatcaatgtgctttataatatagtagacagaatttacatcggtcatattccgggatatggagatgtggcactgaccggcgttggggtaacatttcccatccttacgatgatctcggcattcagtgcatttgccggaatgggaggcgcaccgcttgcgtcaatccagcttggaaaaaagaataaacagggagcggagcagatccttggcaattcggcaggactgctgatccttttttctgtgattctgacggcgttcttttcgatatgtaagacaccaatcctttatgcattcggagcaagtgatgcaacgattgtctatgcaagagattacatatctatctatctgatcggaacgatctttgtacagctggcacttgggttgaatgcctacatcagtggacagggagaagcgaagacggcgatgttgtcggtactgatcggagcggtcttgaatatctgtctggatccggtgtttatcttcgtgctgcatctgggtgtgcgaggggcggcaatcgcaaccattttgtcgcaggcggtcagcgcggcatgggtggtacatttcctgacttcagaaaagactgtgatgcacctgtcgctaaagaatatgcgcctgagagcggatgtgatcaagatgatcgccggacttggaatctcgccgttcatcatgcagagtacggaaagtcttgtgacgatcacgctgaatacaggacttcagagatacggcggagacctgtatgttggttcgatgtcgatcctgatgagtatcatgcagttgatcacaattccggtgcaggggattacacagggaatccaaccgatcatcagttataattacggcgcaggaaataaggaacgtgtgaaggatacgatgaaacggatgatcctggtatgtctggcaggaacgcttttacttgcaggcgttgcaatccttgcaccgcagatttataccggattatttacgaataatcaggaactgttgaaactgacatgccaggttatgccggtttattttctgggaatctctatttttggaatccagtgtgcgtgccagacatcgttcatttcactgggacaggcaaaggtgtcgctgttcattgcgcttctcagaaagattattctgttgatcccgcttgcaattattttgccaaaattcatgggggtgatgggaatctaccgtgcggagccaatcgcagatgtaatctctgttgtgacgacaagtgttgtatttatctatacgatgaaaaaagttttgcgtaatatgtaagacaatggtaagatgaaagagacttgaggatgaggaggttttcaatatgagtgaatatgtaataaccatcaacagtacatctgatctgccaaaagagtgggtgtgggaaagaaaaatcccggtagttcctctgaactgtacgatcggcgggaatacttaccgtgatatgtatgatctgtccgcagatgaattctacggcatgttaagggccggggagatggcagtgacatcacagccaagtccgcaggcagcaatcgatatgctggaaccaatcctgaaagaaggaaaagatatcttgcatcttagtttttcatcaggacttagcggtacatataacagcatgtgtatagcagcagaggaactgcaggaaaaatatccggaaagaaagatcgttgtgatcgatacgctctgtgcaagtctgggagaaggactgattgattataaagcactggaacttcagaaagaaggaaagagtctggaagaagttgcacagtgggtggaagagaataaattaaaaatctgccatttctttatggtagaagatctgaatcatttacagaaaggcggacgtatctcgaagacggcagcagttcttggaacgatggtgcagatcaagccgatcatttatctggataatgaaggaaaacttcagatcatcaagaaagaacgtggcagaaagaaagcaatgaataagatcgtggatatggcaatcgatgcatgcgaaggaaagatgccggatatggtgatgattccgcacggcaattgtccgaaggatgcagagtatgtagcggagctggtgcgtaagaaaatgggagtaacgaatatcatgatgaatgatatcggcactgtgatcggcggtcatacggggccgggaatggttgcggtagtctgcatgggagtgcacagataataaaatttcagaatacagcatataaaaactgagataataaaaaacttgaaaaaagatattgacagatgcagatacatatggtaaattatatgttgcgtaaggcaaaaaagaaagtagagtatccactctcaccttagcacaatcgggtgactaatggtttgatattgagtataatacagatttgattatagatctgatgatacagatatgcaagtggatagtctcgaactattcacttattttattttatgatggaggtgcacgacaattagcgatttaatgattaacgggcagattagagacaaagaaattcgagtgattggagagaatggagatcagttaggtatcatgagtccaagagaagctatgaagcttgctcaggaagcagatctggatcttgtgaagattgctccaaaggctcagccacctgtttgtaagattattgattacggtaagtacagatatgaacttgcaagaaaggaaaaagaggctaaaaagaaacagaagaccgttgaagtaaaagaagtgcgtctttcaccaaatattgagacaaacgatcttaataccaaagtgaataatgctaagaagttcatcagcaaaggtaacaaggtaaaggttacactgcgtttcagaggtcgtgagatggcacatgttcagcagagcaaacacattctggacgatttcgctcagatgcttggtgacatcgcagtcattgaaaaaccggctaagatggaaggcagaagcatgagcatggttttaactgaaaaacgttaaaaatacaatacaagttgaaggaggagcatatcatgccaaaaattaaaactaatagagcagctgcaaagcgcttcaaaaagacaggtacaggaaaattaaaaagaaataaagcttacaagagccatatcttaactaagaaatctacaaagagaaaaagaaatcttagaaaagcaacaattgctgatgctactaatgtaaagaacatgaagaaggtattaccatatctctaagataaggttcaatttgtgaaggaggaagaataagacatggcaagaattaaaggcggattaaacgctaaaaaaagacataacagaacattaaagttagcaaaaggatacagaggagcacgttctaaacagtacagagttgcaaaacagtctgtaatgagagctcttacatcttcatacgcaggaagaaaacagcgcaaacgtcagatgcgtcagctctggatcgctcgtatcaacgctgcagcaagaatgaacggtctgtcatacagcaagttcatgcacggcttaaaagtagctaacatcgagatgaacagaaagatgcttgcagagatggctgtaaatgatgcagaaggatttgcaacacttgcagaagctgcaaaagctgctttagcttaattttaatagagaattttaacacgcaggaaaatcctgcgtgtttttttataccaaagaatactatgccgggtaatttaactgttcatcagtaatattctcaagaacctcggtaagatatttcttagacagatatttcgccatcggaaggttcatatccagatagttgccacagtctttggcagcggctccgggaacttcaccttcgaattctgccataaatgtatacatttcttttaataacggcacgatatctttggattcataacttccggcgaggatcagatagaatccggtacggcatcccattggtccgaagtagatcgttttgtcggcatattctgcatgattgcgtaagaatgttgcggcaagatgttcgatggtgtgaacctcagctgtgttcatcactggttctttgttgggacgggtcatgcgcagatcaaaagttgtgatcggattaccggctacctggtcgacacgggaaacatatacacccggaacaagtctcaggtgatctactgtaaaacttgcaattttttccataattaatacacctcttttttttcaaaatttttcaaaatattatgcagaaatattatagcattttcagcagaatttgactataaaaagatgaaaaggtgtgatatactgaattttatattggcattagaggtcaatgcggttaacagtgtctgtggagtgtattcatggatggaaaagggtattttaggaggaaaaattaggagaatgaagctttatctggtaagacatggagaaactgattggaataaagtaaaaaggattcaggggcaggtagatatcccgctgaatcagtttggcaagcgtttggcagaagaaacagcggaaggattgcgggatatcccgtttgatctgtgtatttcaagtccgttgtcaagagcacatgagacggcgagaattatattgtatgggaaagatatcccgatcatcaaagatgccagaattgaggaaatggcatttggtgaatatgaaggaaaatgctgtgcaagagataactgggaactcccggaggattttcacaaattttttaatgatccggcaggattcgtacctgggaaaggcggagaatcatttgctgatgtgaagaagagaaccggagaatttctgaagagtctgtataaaaagactgagggtgtatatgaaaatattctgatcaccacacatggtgcggcactggccggaatgctgaataatatccgaaaagagccgttagagaagtactggggaatcggggtacacagtaactgcggagtaacagaagtagaagtgaagaatggagaggcgacgattctttctgaaaatgttacatattacgaggaaacagtaagaccatgggctgataaataaaaatagttataaaaatcatgatatcataagagcaaaaggagaatgaatatggcaattgaaacagtgggacaacagaagtatgcagatttgactgcaaaaagaattaagtcgttgcagacggggatgataatctggatcagccttttttgtctggcactgatctgttctttctctaataatctacttgcaatcattgtgggaattgtagcggtagtctatgcagtggtcaatacaaagggaagaaaagcattcaacagtaaactagataagatagaagataaaaatgaattctaccgccagattgtggcaccagatgtacttgaattgaaagaagaacagcttctggttgcaaaagattatgtcattgtagttgatgcggatgtatggatatacgatctgcatcatatggaaaaagtagaagtgggaaaacaaggaaatgtgaagaaaaccctgttcctgacagaaccaaatggaaaaagacatgccattttgtcgacaactaagggggatggaagacaggaagcgtttgatcaggtgtattatagattgcatgatcgacttgctgtttagttcatcatcgtggcttaccccggttcatgagaaagacttggtattctggttctaacatcgctccatatacgccagaaccagaataccaagtctttctcatgtcgtgataggccaatgataatgaattcaacagcggaattataacccttgtgtgtagctgggaagttttatggaggtcagggtaacgaccgctttatgcatttaacagcaatctaattatcttcctcctgaaccgtataagtctgtctcttacgagccatctcatcactttcaagatattcatcataagtcgtaatcttatcaatcagtttaccgcccggtacgatctccatgatacggttggctgtggtctgcacgatctggtggtctctggaagagaagagcagtacaccagggaattttgtcattccgttgttgagtgcggtgatgctttccatatccaggtggttggtaggctcgtcgaggatcagtacattggcaccgctgatcatcatcttggataacagacagcgtaccttctctcctccggaaagaacacgtaccttcttcacaccgtcatcaccggagaacagcatacgtccaaggaatccacgtacataagtggcatctttttcttccgaatactgtgtcagccagtctacgatgctgtaatcgttgtcgaattcacttccgctgtcgagtgggaagtaagcctgagttgtagtgattccccatttataagtaccttcgtccggttccatttctcctgcaaggatctggaagagcgttgtcttggcaagctcattgcttccgacgaatgcaaccttgtcatcgtggttcagagtaaaggaaatgttatccagaaccttttcgccgtcaattgttttgcttaatccttctaccgtcagtacttcgttaccaatctcgcggttcggacggaagtcgatgtaaggatatttacggctggatggctggatgtcatcaagctgaatcttctccagggcacgttttctggaagtagcctgtttagactttgaagcattggcactgaaacgtgagatgaattcctgtaactctttgatcttttcttcttttttcttattggcttctttcatctgacggatcagaagctggcttgactcataccagaagtcatagttaccggcatagagcttgatcttaccataatcgatatcggcgatctgtgtgcagaccttattcaggaagtaacggtcatgggatacaacgatgacggtattgtcaaagttgatcaagaattcttccaaccatgcgatcgcatcgaggtctaagtggttagtaggctcgtcgaggagcagaatgtccggattaccgaacagtgcctgtgcaagcaggaccttaaccttctccggaccatttaagttcttcatcatttcataatgcatttcaaccggaattccaagaccatttaataatgtggcagcatcagattccgcttcccatccgttcatggctgcgaattcaccttccagttcgctggctttcataccgtcttcatcggtgaaatcttcttttgcatagatggcttctttttctttcatgatctcatacagtcttgcatttcccatcataacggtatccagaaccggatattcgtcgtatttgaaatgatcctgctgcaggaaagaaagacgttcacccggtgtgatgatgacctctccgttcgtcggctcaagctgtccggacagaatcttaagaaatgtagatttacccgcaccgtttgctccgatcagaccgtagcagtttccttctgtaaatttaatattaacatcttcgaacagggcttttttaccaacccgtaatgttacattacttgtactaatcatattggtttgtattctccttgtcgtttgaatcttcgttgatagtgactgcgctcggatttgcagacgctgactagcatatagtaccagagataaaggaaaatagcaagggaagttcctcttttccttctatgaaaaagggtatataatgatagcagtatcatgcgcagagctgtcggtggcaggttctgtagataaacgataaaaatgcgcagacaaatttacgaagattataaagctaaagagaggtaagacttatggtaaaagcaacattagtactggaaggcggggcaaaccgcggagtatttacatctggagttcttgattatctgatggaaaaggacatgtatatgtccaatgtgatcggcgtatcggcaggtgcgtgtaatgcggttgattatgtgtcgaaacaggctgggcggagccgggaatgtgtgatccatcgtgagaaagaatacgattatgtatatggtttaaagaagaccctgaaagaaaaagccctgatggatatggatatgctgttcgataaatttccgaacgaaatttatccatttgattttgagacttattttgcatctgagatggaatgtgagctggtggttacgaactgtatcacgggagatgcagaatatctgtcggaagataaagatccggaacgtctgatgaagatctgccgtgcatcgagcagtatgccgcttgcggcaccgattgcaaatgtagacggaatcccgtatatggacggcggccttgctgattccattccaatcgaatatgcactggaaaaaggaaatgacaagattgttgtagtattgacgagaaatccgggctaccgcaagaagagagcggtaaaagcaacggaacagctttataaaagagcttataagaaatatccgaatctggtacgtacgatcatgacaagaaatgctgtatacaacaagcagatgaaactgatcgaaaagctggaagaagaaggaaagatattcgtgatccgtccgctgatcccgactgtgtcccgtatggaaaaggattatgacaagctgcagcatttctatatgcatggaaacagactgatgaagaaagaatatcagggactgctggagtatctgaacgaataaatataaaagcagattataatgtttatggaaataaacagagtaagaaaaataaaaacaggatgagacagagaatggaaccaagaacattactagattttatgggcgtggcagaacgcctgaaatgtaatatgcgccattccagaacggcagagaacagacgggaaagtgtagcagaacatacctaccgtctgtgcgtgtttgcatggctggtaaaagaagaatttccggattgtgatatggacaaggtgatgaggatgagcctgttccatgatctgggagaagcagtgaccggagatattccggcatttgtgaagacagattctgaccgggaagtagaagaaagtgcaatcagtaatgtgacagtgatgctcccggaaagggaacgaaaagaactggatgcgctgtttgatgaactggaaaaagcagagacgatggaagcgaaaatcgtacatgcactggataagatggaagcattgatccaacataatgaggcagatattgcaacgtggcttccactagaatatgatcttcagatgacttatggagaaaaagaatgtaaggcggatccatatcttgcgaagctgcgtgaagtgatccgacagatatcggcagataagattgcctcagagggagaagaaaggggacagtcttactatataagaaaaggtgtggagaatatgcatctggaagaagtggcagcacttctgcacagaacggactgggcaaaagacagaacggaagagctgatcagaaaaagtatggagaatgcctgtccgtatggattatttctgagtgactgcatcagtgaaggcggaaaagacaggcagatcggatttgcgagagttctgacagatggtgtgacgacattttacctgatggatctggtcatagaagaagcgtatcgcgggcaggggtttggaacaatcatgatgaatcagatcatgaaggaaaacgggcatctgtatggtatgcttcatacacaaattgcaaaagcattttatgaaagatatgggttccgggaaataggaaatacaaagaaaacagaagaaatatatatggaaaaaccgtgtggctaaaaatagctacacggttttttgttcaaaaggaaaaggctaaagtattcaggattttctgatatctatagatcttccaggttaatatcgcggggcgtttccatatgtttcaatgtaatctcatagatgtgggaagtatcgccattcttcatacaatccaaaattgccatatgttcttcgtaagtctgttccatacggcctttatgtgcaagggagagttcagccagccgtttcatgcggtacatgaacatggcgaatacatttgaaaactgttcattttccagataatctatgatttttgtgtgaaactgaaaatcatattcggaaaattctttgatagaatgtgtagtttccataatatcgttcatgcactccatgatccagtctagctctttaaaaagctttttcgctttgcgggtagaagaagctttactgatctgaacggtgcagtatgtttccagtgcagaacgtacctgaaatgtttcatttacatccttccggttcatctgatgcagcataaatcctttgctgggaataatatcaatataaccttcctgtgcaagtctgtgcacggcatctcttagcggggtgcgcgaaattccaagttcttttgataattttgtctcggaatagacttcctgataggaaaaatgattctccatgatcaatttctggagataattataagcttgttcattgagtggtgtcatagtaactccttatatttcacgataattatttatttaacaaaattcatgcgtttttcgctataaatatcatacaatacgggctgaaatcggtcaagtgaaaaggaaaacaagggtgaaaaaagttgtctataatgttaagaaaataacgaaagaaaggcgatgcatatgttaaaaatagacaaaaaaagaggcggaaaactggtgaaataagagaaagaaaaataacgtcttgaccggtataccggtatgtagtaaagtgtagtcagaaacaaaaaagaacgatacatttcactgagccgaacggaaatgaacaagtgtaaactatgttgtgaaagtaaacgatcatgtggagtgaaaaagagaaaggatgtatgaaaatgaaagtaggatttattggacttggtatcatgggaagaccgatggcaaagaacttattgaatgcaggtgtagagctgctggtatctgatttaaataaagaagcagttgcagatgttgtagcagcaggagcaaaagaagcaacatacgcagagattggtgagcagtgtggaagaattatcatcatggttccaagcggagcaatttccaaatctatcttatttgatgaagacggtgttgcatctaccatcaaagaaggaaccgttgtatgtgatatgagttctgtaacaccggtagaatcaaaggaatgctacgaaggactggaagataaaggtgtaggattcgtagatgcaccggtatccggaggagagcctggagctgttgcaggaacacttgcaatcatggccggaggagatcaggaagacttcgatgcaatgaaagagtattttgacattcttggatcttctgcgttactgatcggtggaagcggaagcggaagtgttacaaagcttgcaaaccaggtaatcgttaataacacaattgcagtggtatctgaagcatttgtacttgctacaaaagcaggagcagatccggaaaaagtatatcatgcgatccgcggaggacttgcaggaagcgcagtacttgatgccaagatcccgatgatcatcgagcgtaacttcaaaccaggcggaccgatcagaatcaaccataaagatatcaagaacgtagtaaatacagcacattcgatcgatgtaccgattccatatacagcacagctttatgaaatccttcagacactgaagatccacggacatatgaatgatgatcatggcggaattgttcagtatttcgaaaaacttgctgacgtagaagtaaaaaagacggaagagtaaaggagaatggacatggcattgaatgcagaagtattaacttcatataagaagattgacgaagcttatatcgatgaactgttaaagaaagaaattgaaaagaataataaaaagatcgttgtcttagacgatgacccgacaggagttcagacggtacatgacatttccgtatacacaaactgggaaaaagatacaatccgtcagggatttgatgaggagaataacttattctatgtcctgaccaactccagaggatttacagcggaacagacaaccaaggcacacaatgagatcgctgcagtggttgacgaagtcgcaaaagagaccggaaaagaatacatattcatcagcagaagtgattctactcttcgtggacattatccactggagacagagcttctgaagaagaactatgaagccaatacaggaaagacgatcgacggtgagatcctctgcccgttcttcaaagaaggcggaagatatacgattgataatgtacattatgtaaaatacggtgaagagttgattcctgcgaatgagacagagtttgccaaagataagacatttggctacagtgcagcgacaatgccggagtatgtagaagagaagacaaaaggggcatacaaagcttccgatgttacctgcatttcactggaagatatccacgatatgaacatcgacaagatcgaagaagcgctgatggaagtgaaagacttcaataagatcattgtaaatgctgtggattatgcagatgtaaaagtattctgtgtggcattgtacagagcaatggcaaagggaaaagtattcatgttccgtacggcggcagccatcgtaaaggttatgggcggagtaaccgatcagccgcttcttagcagagagcagatggtggtaaaagagacagaaaacggaggaatcatcgttgtaggttctcatacagataagactacaaaacaggtggaagaactgaagaaactgacagacattgaattcatcgaactggatgcaacacttgtaaaagatgacgaagcatttgaaaaagaagtaaagagatgtctggatctggaagagacttgcattaaagccggaaagacagtctgctgttatacaacaagagcactgattactgctgatacaggtgataaagaggatgagttaagattatctgtaaagatctccgatgcagtacagtcactggttggacgtttaagtgtaacaccaagctttgtaatcgcaaaaggcggaattacatccagtgatgtaggaacaaaagctctggcggtaaagaaagcgaatgttcttggtcagatcaagcctggaatcccggtatggcagacaggagaagaaagtaaatttcctctgacaccatacgttatcttccctggaaacgtaggtgagatcacaacattaagagaagctgtggaagtgctgacagcaaaataaataacaaaacatgtcaaaaacagacaagacgaaatagacaaaacgtaaaaaaggaattgaggcagaggaaaagaactctgcctcagtaaaaaagagagaacataggaggtctgtattatggtaaacggacttagcggggaaaggatgttgattggtctggtgataggtatcgcagtcctgatattccttgtgttaaagacaaaaatccaggcatttcttgccttgatcatcagtacagttgtatttcagtgttactattttaatataattttcctgcttaatactatatataattttaagcgctgcaagcaataataccacactcatatatgcaaagaatattctatatttcaaatgtaataactgaacactcattccccctattgctacaaaaaaagaatataccaagtatccttttataaactttaccgaataactttcttcttttatatcaacagcttttcccaaagcatataacagcatagtaaaaatcaagaaaaaacatccacatactaaatactctttcatcttacttcaaatgatatcgtttcctccaataccactattcccctttcttttcttccgcatcaattttacgatctattgcgatttgttgagccagactatcaactttattttccagtgccgaaatttgaatcgtattataaaacaacttcacgatcaaaacaaagataacgatcagatataccatattaactgttgatttaaatcccaggaatttcgatatagctgacattatttgtgggaatactcccataacgacaagtatacatgaaaaaccaatccaaaaaactgtatattctatttttaactttgccaagcgtatctttctaagcataaatgccaataatactatagctcctacaacaagtaaaattctaataaaaattgacatattatcccctctttctaaagttttgtacaaataatattgatatcaacattttaaccatatatttagctgcattcgtcaaattcagataactttctcctgcaactctctcatccatatttactggtacttcggaaatctccgctccatttttcaacaaatatgatacagtatccggctctggtccataattcaaattctgtgcgaattctttaatcattttatgggaaaacattctcattcctgatgtcggatctgccaccctttttccagttgtaattttgatggctacagtaagcatcttacttccaatcattcttaaagatttttcctttttctggttgataaatcttgatccgattacaatatcatatccttcttttattctatttaacatcggttcaataaactctggtctgtgctgaccatctgcatcaaattgaattgcatacgaatatcctttcgtatatgcatactttaatccagcctgaaaagcccctgcaagtccaagatttaccggtagatttaacatttcatatcctttgctcctgcaaatatccgctgtccggtctttagatccatcattcacaacaatataatcatattgactatacttattcttaatgaacgtaactacattttctatattttcttcttcattataagccggaatcactatcaataattcgcttttcattcttttctcctttgcttatattattttatatatccttcaaaatcatgaaatacccgatcttcttctttcggtaatttcatataatctccatacattttcgaaagatactcctcatatcctacagggatcgggaacattccatctcggaacttaacatattttgcctctgaaaatacttctttagagaaaaattctttatcttctaccggccatatgcggtctcctacatatgttccctcacaaggagttaccatatctataactttcttattccaatatttgtaatccttatttctaaaaagtatcttatatgcaccttttccgataatgtttaaaatatttttcttcatcgttgtaagattacctgcaacatatattttattcatcatcttataaaagcgatgctttttcatgatttttcttaatgtttctttttcatccggccatatatccatcgggaatatatccatccatacgcctgtagcatattgtctttttatatccttttcaaatactatagtcgaatcatctactaatttcatgtacggataaatataattatcatctagcggtaataagaatttgtattttctttcagtatccaggtacctgttatcttttaccagcgcaattaatttatcataatctttacgtaacatgcatacatctatatcgtcatcccagggaataaaatcctgatgccttactgcccccagacatgaacctccgcttaaaaaatacatgatattattttcttttgcaaattcatcaaatctttttaacaaattatattccagcgattgtatttctttaaattctatttttttcttatattccttcattgttttatcctaactatttatacttaccataaaaaagcggtatactttttccaaatattcttttgaagtgaatgtgaatctgactccatccacaaaaaaatgaatatatcttttttgctctatatcattaagtaattcattaaacctgacatttgctttcagatatttttctgcctttttagaagaattcttctcggttacatattgttttgctttttcaacatccgcaatctttccttttttataagaacacgttatatattttgcatacaaaaactgttcaaataaattgtttctggaaatactctgagatgtcattcggtactgtaacactactttattaagattcgatactctatatccctttaataatgtcctcaaagtaaaatcatagtcttcgcacaatggtatttttctgtatccgtttaaatgttcaaacatttcttttcttccaaaccaggtcggatgtggtacaacctgattatagcggatacacttttttattttatccggattcgctgggatttttttgatggaataaataactttttcctcttcatctattacttgtgtaatccccccgatcaaatccacattacatttttccagatattctttttgccactgtaatctttccggaacggatatatcgtctgcatccatcctgcagatatatttgccgtttgcatacgacagacctctgttcaaagaatacgtcagcccctgatttttttcattaatatggaattgaattctattatctttttgttgatattcctttataattctaatatgatctgaattatccggattgtctaaaataataatatactcaaacgctttatacgtctgatttaaaatagattctatcgatcgcctgagctgattttcaggctctttatatgtcgccattattactgaaacttctgtcataacactcctcaattctatttatactttatctttatttcggattcatttcacgtttactattcatacctatagcataccactttccctattataacgaacaataccttaaaaagcaaattaaaagctattgactttattcttcaaaaatggttacataataatattacgaaaaaagaaagttgaggtattctatgttcgacactttacaaacatttattgcccccaggctgcgtagttttctcaaactgctgtccatcgggcactttcataaaaaaagaattgtatttttcagctattttggcgcacaatattcttgcaatcccaaatatatttccgaatacatgcaggaacgccatcctgattttgagattatatgggcttttaaatcccctcaaaacttttcttacttacatgataagggaattaaaaccgtcaaatatttgcatccttactttttgcatgtatgcctgacttcaaaatttattgttaccaattcagaaattcctgcatggtttccaattatgaaacgtcaggtttatattaatacatggcatggtggtggagcatacaaacgtgttggcgctgcctatcagaaagaaacccccggaaaacagatccgcgcggaaattgcacgagaagtaccttgtacatatgtatcaagttcaaacgcatttacagaattaacgatccatcaaagttttcatcatgacggaaccattctttcctgcggaatgccgagaaacgatatgctgttcaataatgatcatcctgaattgcacgataagatccgagcgtactatcacctcccttcagaggcaaagatccttctatacgcccctacttatcgggaatcaaaagcggcttctgattatttattcgactgcaaggcaattcaatctgctctttcagaaaaatttggcggcaactggtttattctattccgtacacactactttgttatgaaccagttaaataatgctgccaattacattgatgcttccaattatcctgatatgcaggaattgctgtatgccgcagatgttcttatcaccgactattcctcttctatgtgggatttttcacttacacggcgcccgtgctttttatatgctacggatttgaactactatgatctggatcgtggattttattccgacattcacacctggccatatcctttagccgagtcaaacagtgcgttaattaaaaacattaaacaatttaataatgatcaatatcaaaaaaatatccaaaagcactgggatgcgctcggcagctatgaatccggacatgcctgtgagaccgtcgcaaattatattttaacttctaatacataaaagggaagagcaaatgctcttccctttttaaaatcctaagatctgtgaattttcttccgcttcaacaatcgctctaaaggtataaaaatccgatggtgtagttatttttatattttccggttttcccattaccgggaataacttatatccttctgcctgcataagtgtcgccgaatcaatgtaagaattaatgttctcttctctcgcatgatcatgtgccgcaagcaattgtccatatatatatgtctgtggagctcttgcaaaacgacattttttccgttcaacgctttgagttaattcatttttttcattaaccatcataaccgtttccgttgcttcaacaacagttattgcatttcccttttctttcgctactttgatattttcacttattaattcttcattgatcaatggacgaacaccatcatgtattaatacaatggaatcttcttctatttgtccccgcatcgcattcaaaccattatagatagattcctgtcccgtttttcctccaggtgtaatccatttcacctttttaagctgatacttttcaatcagctttttcagataatcgatccagccttctatacatacaacagatattccatctatttccggatgattttcaaaatgttccagagtatagataattatttctttattgtgtaatgttaaaaattgttttggttttgttttggtattcattctggtcccggttccgccagcaaaaatcactgcataattcataaaactttcctcctaattatttttttctgtacacccagtgtgcaagataaatgagatccaccattctatacttcattaaagaccaatacagctttcttgtgaccggtatattttcagtatttatatttttaaaattatcccggtaacactttcgtcttaaaactgttttcaattcttttcgtctcgtcaggtaattttttggattatttttatgtgcataatcgctattaattgactgacttaacaattgaatactcttattattgtacgcctgatagaaccgctcatcttttccatgttctttgataaactttaatatatatctggatattctttccagaatatcaatcgtgccctctgtatacttattcacagttgaaccgctattcattcgataatgatataaaaaacgtttcacatacaataccttttccgccatctcaaatgcatgcagattaaagactgtatcctgccctcgtcttaattccggctcataaattatattttgtttcctcagccattcaacatcatatgcttttgcccacgttgttccaaatgttgcaaatcttggcacataactggctgcctctttaaaaatagcctgtaattccatttcttctttttcttttcctgtgaaatatttcttttcaccattccaaaatggattttcaatctcttcgtcatttttatttatatatgctgccgaagatataatctgcacatctggattatttttaaaattatcataaaagaaagcacaaaattcaggctctacccagtcatctgcatcaacaaatgttatatacgacgcttttgcatttaggattccgttatttcttgctactgctaccccctgattctcctgttcaactaccctgattctttcatcctgtccttcaaagcttttacataaatctaaaatttcctttttcacaccatcggcaacaataataatttcaattgcttccaatgtttgttgtttcaggctcaaaatgcattcttcaaaatattccttttccacactgtacacaggaacaactacactcatttgaggttctatcataattattttactcctctgattttttgtatcatattaactaagttataatacaaaaatacacttctgtattttctatgttttaacagccataattttattttatttaaattaagatccatcacccgaagatctattgctgcaatagcagacttatatggctcttcattcattagtattttaaattcgcgaaatgcatttttcctattcggattatccggatgtaaaaaatattttccgatcagaaaatacgcaataactccaactctgacacaatacgtatttctatatgtctcagatgtatttattcttggttctaattcatagtatttctttaaaatacgcgtagatgtgtctgcatttcccgcaaaaaacgtgtgtgtcgtcgactcgccgtgcagcctgtaatgatacaatggtttatttatatatgtaaatctttttatatacttatgatattcatagttaaaaagtttatcctctccttgtttcaaagagctgtcaaatcgtatattattttctttaatgatacttcttttatacaaatgacaaacaggtccctccaatgtcggaatccttatctcatctttcgacagcgaaattgttctcaaaaaattcaaattaatcttttcaagaagcttctcatcatcaacactaagatctttttcataatttttctttatttgctgatttgcatccttgtttaaatacatgttccagacaaccatatcatttccgtcacgcttttccatggccagttcacacatatttttttcaatccagtcatccgcatcaataaaagtgatccactctcccgttgctttttgaattgcattatttctggccatagatacaccttgatttttctgatgcaaaaccataatccggctgtctttttccgcatatagatcacaaatttctccacaattatcaggcgatccatcatctacaagaataatttccaaattagaatacgtttgtttcgatatactttcaatacattcttttaaatattgttctttaattttataaacaggaacaataacactgattttttccaccaactattctccttacgcttccatatcattcatcatacgcaaatatgcttctttcatatctacttctgctttccagcctaatttatttaatttttccgagctcaaatgcattttcacttttggagcatatcccaggctcttggcctcatctggaatatcaaattctacttttatctctccattcgaaacatcgtttgccacaagttctgccatttctcttatagtcatatgcgacttttcatttacaacattataagcttctccgactttccccgaatatcctaaaagcaacaatgccctgataacatctcttgtataacaataattgccttcggaacttccatctgttcgcaaaacaagattctctttcttcatagcacttcttgcgaattgtgcatatacacgattatcttcctgtaatacgcccgctccaaatgtttgtgcaagtcttgcagatttcaccggcaagccaaattctgccgcatatgcgttacataagcattcacatattctttttccctctgaataactgcttcttacattttccagttctatataccccagatctttttctgttatatactctttcttttcatccggaataccatatacttccattgaagaaacatataccattccttcaatctttttatctactgccaaatccaatacattctttgttcccatatatgaagtttgtatcgtcaggaccggatgctgcaccatcatcttggatgctgtaatactgactgtatgaaaaatatagtctacatctcctgctattaccggtatctgttcaatgtcaccgatcatcaaatgaattccgtagttattataccattttccatatattctttttgctttttcttcatttctgatcaatccaataatttttatatttccctgatgcaaacaattgtaatacgcaaaggctttcaccagtaatgaccctataagccccgtcgctcccgttacaaatatggttttatttttgtatttgctccattccagatcactgttagcaatatattccaaatccatttcttccatagatttttccatttttctttctaccatcacttattttctcctcttttgttttcataaaaatcatatacttcttttaatactttcagggattgtaaatgattttttatttcaaacatttctttttttctattctccttgatcatatcatctgtcgatgcatcttctcgatgaaaaacatgaatatccggtaaatacacactgttcaatccattttcagtcaaatgcttcattaaaattgcttcttctctatataagaaagttctatcatccaacccattaaacttttctatatattttcttgagaacagcataaaacatccatgaagttgaacatactcgcatctcttaataaattcttttttctttttcttttttaacggttttatttttcgataaatattctttatcttttccaaatgatatttgtaaaccacactttttattttatacgcctgaatatcatgctctacttcctgtttactcattgcattcgttcgtatagggttaatatcacatctgccgtcggcacttaatatcatcggccctaatacagcaaattgacttcttttatattctttctctactttttcaaggaaatcatcatctaacaaataaacatcattattcatcaacacaatatatgatggattccatgttttttcagcatatctgaagcccacattatttccccttgcaaaccccagattctcctgatttaaaagcacttctacatggtcatcatttttataatgttctttcaataatgcacctgatttatccggggacgcattatcaacaattactatcttatacatgtctgtatcgatttttttctcaattgaatccacgcttttgtacgtttcatctattgccagatagtgtaaaataacaaaaactattttcatattttatcctctacatttttctttttaatgttatcgagctctaatcttttttattttattaaaaaactgcgtttcaaattgcttcaaatacggatctctgattagtgtcaaaataataaaatatcccagacaacatcccgcaaccgttcctactaaagttatgaatacactgttcgttatcatattcattacaaatcttcccgcaaaaaaccatacacttgctacaaaatacaccataactcttgtatataacatctttgtattaaatatcttacgtgcatagtaagtcaagataacaaacacaattatttcagagaacaatgttgccaccgatgctccagtcacgccaaacattggtattaataatgcattcgcaattaaattgaacactgctccgccaattgttgatatcaatacttctttatcttttttatgcggaatacaaatctgataagccagcactcgattaatagctccaactacaactttagcagataaaatttttgccgccgtacttcccgttaaaaattctttgccactaaatattaatatcaaaatatcactggtacagatcattcctatagccgccggtatcgctatcataaaaagaatatctacagattctttcatcagcttctcatattcttttttcaaattatttcccagataataagacactcttggcaggatggtcgctgatatcgttcctatcaatgtacttacaattgtattaatctttacagctgccgtatagactccggtagccttatctccacgaaatgccccaagcatggttgtatccattgtcatatagatactggatgcaacacttgttccaaaaatcattaatatcggctttaaatgctttctatattctaatctttcttttttctgtttccaatcgactatttttctcgaatgccacaagttaaaaaaagcagatcctcctgacgaaataaccgtcaatgccgcataccagtaataatcatttttatttttaaccaatacaaacaataatatcaatgaaatgatctgaaataagattgcccttttcgtgatataagcatattcttctttgattgtaaaaatccactctgttcctattgttgtaaaaatgatacttaaacttgaaattactaataactttttgtaatttcccaaaataggtaacgctaaaaaaacagccaatgcacaataagcgataaacgttgtgcacaaatttatgttcaacatttcacgtgagaacttgctgaatttctctttatcgtctctaatccgtgctccttctcttactgcatatgtactaattcccagcgctgcaaacatagaaaagtaagacacaatagaacttgcatagttaacacggcctatccctgtagcgcctaagattcttgacgcatacggaaatgtaattaacggaaatatcaggctcattaacgtttttattgtattcattatcaaatttattttgatagatttttgcttttttttcatgtcctctccaatcttctttagacctttcgccattatatcacttttccatatggcaatcaaccttgacacttttaatcttacgggactccatttttttccataacctgcgctctctttccttataatgcaaaatttctcccacaagtatcagtactttctttcgattgtgattttaagcaacacatttttgtatcttccccttttttatcactaaaacattgtgattttcttatgttcatgatacaatatttatgtcatttcaattcaaacgttgttttaaataacatttagtattcattataaatgaaaggatatcaaatcatgaaaaaactatcacaatcacttctcgcaaatcttgtaacaaatcgtcgaaaagaaaaacacatgacccagcaggatcttgcagatatcacagggatcaaccgttctatgatctcacgtttggaaaaagaagattttattccttctattcctcaattagagcaattaggagaaacgcttgattttgaaccccagacattatttgttgatgccggcaataccaagcttccttctccttcacctttaaatatcgcggtagccggaaccggatatgtcggattatccatcgcgacattacttgcacagcataatcacgtaactgctgtagatatcattcctgaaaaagtagaattgatcaacaacagaaaatcccctattcaggatgattatatcgagaaataccttgtcgaaaaggatcttgacctgactgctactcttgatggtgaatccgcctataaagatgctgatttcgtcgtcattgctgctccaaccaattatgacagtaacaaaaattattttgacacttctgcagtagaagcagtcatcgaacttgtattaaaggtaaatccgaatgcgatcatggtcatcaaatcaacgatccctgtgggctataccgaatctgtccgcaaaaaatataacacagctaatattatcttcagtccagaatttttaagagaatcaaaagctttatatgacaacctttatccaagcaggatcatcgtatctaccgattcttccgatgaacgactggtgaaggcttctcatacattcgcggcacttcttcaggaaggggctcttaaagagcagattgatacattgttcatgggatttacggaagccgaagccgtaaagctttttgctaatacttaccttgcattacgtgtttcttatttcaacgaattggatacttatgcagaaatgaaaggactccataccaaagatattataaacggtgtatgtctcgatccgagaatcggaacgcattacaacaatccatcttttggttatggaggatactgtcttccaaaagataccaaacaattgctggccaattacgataatgtacctcagaacatgatgtccgcaattgtcgaaagcaaccgtacaagaaaagattttattgctgatcgtgttctcaatctcgccggatattatgattataacaatcatggtgattattctgctgcccaggaaaaagaatgtactataggagtttaccgtcttacgatgaagagcaattccgacaatttccgtcagagcagtattcagggcgtcatgaaacgaatcaaagcaaaaggagctactgtcatcgtttacgaaccaaccctggaagatggaaccacattttttggaagcaaagtagtcaataatttagagcagttcaaaaaactttctcaagctattattgccaacagatataatccgattcttgacgatgttaaggacaaagtatatacccgtgatcttttccaacgagattaatccgaatttcacaaaaagatttgtgtataataaaggcaggtcaaatgacctgcctttattgctaatatactacaacttttgttcctcgcggaatattatcatatatccattttgcattattaatgtttaatcgaacacatccgtgtgatgcattgattccaagtcttccatctataattacagacatacttccttgtttatacagtacagagtggaacaggtaatttccatagaactgtgtataataccagcatgtatatccagatccaaatgattttccttttccctgtacagtaaatgttcctttcactgtcggagttgattttgctcctgtagtacaaacccactttttcacttcattccatttaccgactgaaccgctataaattcctactctgttagctgtcgtatctaccagaatgagataccgtgtgttacttgcatacgccaatgctctcagatgcatctggtctttaactgctattgtcgcagtctttttcttttctgtataataattagcatttttccccggagctgctgcatcttttgatacaaggcgaatctgtaatccttccattctgtatccgatttttgatgttcctgctgcctggccattttttgcccagccaagccagccatatccctgtacatgtgcacgataatatatgtcataatatttggcaagattaccggtaagtctgattttcacagcttccattccattcgttcctgtagatgccccgttggttgtacctgcatcagaccagtccttccagccctcttttgcaatatgtgtcgcatattgaatcgttcctgatggtgcaagtttatttgactgatccagatataatgtaaggctctgaagctgttgttttttgccgattgtccctactgtatttccttgcgatacattgcctgtcgctcctacacctttgatatatccattataatagaagttaccactcttatatccttccacatattttacaccacttgtattcggagccgtttctgcatcttttttcacaaggcatattttcaatgcctcgatcttcttactaagatcaattgttcctgttactcttcctgcagattcgtaattacaccagccaatctttgccagatgtatactgtaatacacttcataatactttgcgatctcaccagtcagcttcactctgatcgcttcaattctcttactctgaccgcttgttcctgcaagttcaccattctttttccagctttgccatccaattccctgtacatatgcccgatattctacatttcctgtatagtcagaatccggaagtgtaatctttattgcctcaattctttttccctgtccggttgtccctgcaatctgattatcacttacttttttctgccatccaatagactgtacatgggtctgatactgaattcttggtacctgataagctttcttcgtacttcctggtgcactttcaccttttttcactaatttgatctcaattgcttctaaacgttttccataagtactgcttccggccttttctccgttctttgcccagtcaagccagccaaagctctgtatatgcgtacgatagtatacgtcatatttttttgctatagcaccttccagacgaacagatactgcttctactctctttccctgtccggttgtccctgcaagtgctccgttttctacttctttctgccagccatatgactgtacatgagttttatatataattttactgtctttttgatcttcttctgataatccggcaagcttaatctttaacgcctcaatagaaagcgcctttccttccgttcctgccagtgcgccatcttctacttttttctgccagccgatttttgctacacgagcctgatataccaccttcactgtttcctccggtactatatccgtctttactatgtatgaatttgctgtgtctaaatcgacatttgtacttttctctgtcaactgaacctgaatggcctttatgccacaatcatatcctttagttccggatggggcatcattttcggcccagccaagccactgtccttcactctgatcatcagtttgaacatatgcacgatagtaaatattatacttttcagccagttcttctgttaattttatcttgaacgcagctatcttctgttcgctgtcaaatccagtctcctggccggccgttacatactcgttccaatttccctctgcatctgctaccgaatatgtgattccattcaaattttcctctgttacagaatccaaaacatctaattttaatttggatatttcagcatctttattctctggctcacccacatattctccattgtctgcttcctgccactcagaagcccctgacattaataccgaatattttaatacaggctgtgattctgcctgtgtttcgtcagcatatgccctggccggcataactaatgtaacgatcattgccataattgcagtcaatgatatcattttcttatacatgattctgcctccttttcatagtatgactttatttgatcacatgcgttttttgagtattacctggtgccgccgcacctttttttaccagaacaacctgtatacattctaatcgttttgcacatcctgttgttcctgctatctctccattttttgcccagtcgagccagccatatgtttccgtatgtacacgataatatacgtcatacatttgagccatttttcccgtaagttcaattcttatggcttccattctttttgcagcaccaaccgtacctgctactgcattattcgttttccagccttgccagccactactttgaacatgcgcccgatacttaatttcacctgagtatttctggtctgtcaatttcagtctgaaagcttccatacgttttgcttcgcctgtcgtccctgcatagccacctccatatacactttctttccatccatatgtttgcaaatgtgccgagtactgtgttaatggttgtacatatgcctgtaccgtactgccaggtgcctggcttccttttgaaaccaattttatctgtattgcctccattcgccttgcaccgtctgttgtacccgcaatttcaccattttttgcccagtcaagccagccatatgtctgcgtatgtacacgataataaatatcataatgatttgctgcttcacccgtcagacggatacgaattgcctccatgcgttttgcttcgcccgtcgttccaccgatcgtaccatccgatacccagtttttccagccatttgactgcacatgtgtactgtattggactgaaccggtataaccaatattagaaagctgaatctttatcgcttctattcgttttgcttcacctgttgttccagatatttcgccattggctttagacgcctgccagccgtctgactgtatatgtgtgctataaattactcccgttttcttagtgtctggtattgtgtttcctccatttaatccagaggtacctgtattaatctttttaatatattgcttacttgcataagcatacatagaagatgaattatattttccggaagtactttcaattcctcctctatccgcttttaacaccggatcactctgcactttataaaaatctccggattctcccaatatcagaaatgcataattggaggaagttcccgtattatacagacttgtagcagaagtacttgcctcttttcgtacatttaatgttgtatgtgctgttgacacagtgtccttaatacctatcgaatatttattttgatctttctttccgccctcactgtccatcttccatgcaagagcggcaattttttcaccccaataaggatctgatgcgtagcttacattaataccactcgctttatctcctaaaaagcctccgtgataataagcccatccggctcttaaatattgttttgacatataagtttctgcaaaatcttttatgcatacatccacacttgaaaatgtattcgcactctggccaggcgatgtatcgactgcattcagtccaaacaaattatttttttgctttgcaatactgcttgttccccaagcactttccaacgcacctacacctgtcatgagcaatgcatttactccatatgaattttgattatttacaaatgccgcccctttattatacatttttgagctgctctgagcatgtttattaataattgtagaaagttcatttgcagaatacgatgactttccacgcagcggaagatattgataataattataatacgggttattggggttaatagaattttttcttgtgttactcttgtaatcagataacattgtcacgtaattagtataaaaataatgtccgtcatagctgtaatatgtggtccccgtcttcatataagactgttgtggtcccacattaactgatccgccataacccggtgtcgtcatatccatacagattctatggataatagaagaaccatctgcataatagttgctataactttttgctgaattcaaattaacaacctgaactttggactggtctactaatcctacaacaccactttgcataaatttcacttttccgttttcagtgcccagatatgctgcatcagctcccgctccaccatagcagtaacctgcggcgttcgtactgtattctttgtattctgtagtattatttccaaccgaagcacctgctgcattcgcccggaaatttacaatataggttgccgcagctcttgccttattagataaatcttcttttactactccatccgtttcttcttcaacatcgaatacatttccgtttccatctacacttacaacggttctttcacctgtggtattttcgggtgtatcaggattctctgttaattcactttgttcctgtgttccatctatttcctggtttatttcctgatcagcttcgtcattcatctgttgctggttctgatccgtctgactactttccatcgattgtccttcttcagtagccgcatcattggctgcagatacacttattccggaaagtatcatactcataatacatatgcaggcaatgaatctttttttacttttcaaattttcttcctccctttcttcatttttcctaattataacacagttccataacaagcgaaatcctttattgcaacagaaaaagtcatttgaaatatggatacttcatacttcaaatgacttttctttcatatactaaagctctctatcttacttctttataaatgttttttctgtacttccaggtgctgctccacctttttccactagtacgatctgaacagcttccaatcttttcgcaagaccttctgttccggccttttctccgttctttgcccagccaagccagccataactttgtgcgtgaactctgtaatatacatcatatttgtttttcatttctccagtcaaacgtatcttcactgcttccagacgttttgctttaccactggttccgcttaattgtccattctttttccagctcttttcccatccatacgtctgtacatgtgactgatattcaatgtttccagataccttcattttctgcagcttaatttttattgcttccagacgttttgcctgtccgctggttccgcttgtttctccattttgtttccaagtctgccagccataggtctgtacatgtgactgataaaatactccctgattagacacataatgtttttcacttgttcccggagcttttcctcctttttctactaacttaatctgaatagcttccattctttttgcgaggcctgctgttccggctatttctccattttttgcccagcctaaccaaccataagattgtgaatgaactctataatatatatcataatgctccgcaagttcccccgtcaacttcaaccttacggcttccatcgccagtttttcccctgtcgttccggccgtctgtccattctttttccagtcctgccagcctttctgggcaatatgtgtacgatattcgatatttcctccgtattttttattttgaagttttacctttaaagcctccattctcaggccttttcctatcgttcctgatgtctgtccgtctttctttgcttcctgccaaccgatactctgtatatgtgtctgatattttatacttgtagcactatttttattttctgctttaattccagatacttcatccgaatatgtctgtccatcggacgttcccactgcttttattgtattcatatcatccagctttacgtcatcccatacaaatacacctgactgctgttttcttccttttccaacagactgtccatttacaaacaattccacgccttcacaattggaatatacttttatctgctgatattttgtatccctttccgtataccttttgcttgttaaatatacaaatttatcttgttgattccaatttgctttatagaaataaaatgcatctttttttgtcgtnnnnnnnnnnnnnnnnnnnnnnnnnnnnnnnnnnnnnnnnnnnnnnnnnnnnnnnnnnnnnnnnnnnnnnnnnnnnnnnnnnnnnnnnnnnnnnnnnnnnnnnnnnnnnnnnnnnnnnnnnnnnnnnnnnnnnnnnnnnnnnnnnnnnnnnnnnnnnnnnnnnnnnnnnnnnnnnnnnnnnnnnnnnnnnncgcttttgaatcaatgaataatatgtctctaatacaaacgcctgatattcctcgtaatgtttatctttcgatgcatcatcagaagaccatgaaaaattttcatccatcgttgcgtgttgatttatattagctcctgcaccatactctgtaatcatcatagaagaggcattgtacgtctgcttatattcatttagttttctattcagagtatctgtgatctcttttcttccttcatcatctgcactggaaacagatgacttaaatcccacatataaattcactccggtatagtctacattgccatttttagaccatttagcacataccttatttgcattactactgtctatctgagcctgaactatatatctcgttgtatcttctttttgagccagctttgcaactgatgaattgaaggatactaatgtattttcgtttatctgaaaatcttttccaaatgcagctgcagatgccggctgataaacctcattttcgattccccacatcataatcgacggatgattatagccctgacgaatcatctcttttaactcttcttttatagatgttttataagattccgcatttgacaacaacaaataatacggtatttcacaataaaccaacatacctctctcgtctgctaaattgtatgttgattgtgaatgaggataatgcgatgttctaattgcattaactcccatctcctgcatcagattcatatcctgtaccttcaaatcatccggcacagcatttccatatccttctctgtcctgatgcataccgactccatgaatctcatactcctgtccattcaaataaaattttccattttttatctcatatgttctgactccgaaattatccgaaaccgtatcaagtacttcatcattttcattatatactgttacatttgctgtatataaatatggatcttttgttccattccataaatgaacattatcaatttgacattttgtactatatggctgaacatttttattggccttagctgttactttctgctctgttccagtaactttattgccatctgcatcataaatatctgttacgatttttaattctttatcgtcattacttttattagatatctcatttttcacatttacatcagcagttgttccatttacattggaatctatatagattcccttattgccataatcttctaatgaaatatactggtcatctgttgaaatcaattcaacatctctgtaaattccaccccactgtgtataatctacattaattggtattgaaacagtatcaatattagtaacattcgccttaattgttatttcatccttaccttgtacataattggtaatatcaaaaacaaaagccgaatatcctccaacatgcgtacctactttctctccgtctataaatacttccgtatttcttgccgcaccatagaatttaataaaaagatttttattttttatttctgaaatattaactgtcttctcatatgtaacagtctttgaattcatttgtggaatatatgactgcctcggatgaacatattcccaagaatgaggcagattcactactccgtttcctgctcccgacgggaaattccagcctgcagtagatgtatcattcgttgaaaagttccagccatcattaatatttaatacttttctttgtgtaaccgcttcttctgaatctgtttcttctgaatctgtttcttctgaaggttcttcctgctgagcctccatgttatcttctttactctcttcttccgtaatgttttcttccgctttttcctgtggactgtcagaatcattcccctgtattaaatcattctctgtctcttttccgtcatttgtattactgttttccccgtctttcgtattattctgatcattagatatttcctgatcttgttgattttctttcgtaatttcgtcagcatacgtcatggtaaccatcgacattcccggtcctgttagtgttattgccaacgaaatacatattgcaacaaatttctttttcattcttttcctcatgtgttattcctactaacactttcctcctccattttttcatttcaagctgctttttccggcagccaaaagcgaacctgtttcctatcctcctttttctcatccgctctttctatttatctttttttataaaaaaattattagtacttccaggtgctgctccacctttttccaccagtacgatctgaatagcttccaatctttttgcaagaccttccgttccggccttttctccgttcttagcccagccaagccagccatacgtctgcgcatgcacccggtaatatatatcatactgatctgccagcgaatctttcaattcaatctgtattgcttcaagtctcttagcttttccctctgttccgctgttttttccgccattaacccacttttgccatccgtaggtctgtacatgcgttctatatgaaatttccttattataactggaatctaccattgctatattcagtgcttccatcctcttggcttttccacttgttccggccgtctcaccatcatgtaccttactcatccatccataggtctgtacatgcgttttgtaagctatttttgcttccttaaaagctatagatgttgctcccggagcaggatttccctttggaaccactttaacctgaaccgcctcgattcgttttgcataatcttttgttccggatggttctccgtttttcgcccagtcaagccagccaaatgtttgtgtatgcactctgtagtaaatatcatacttttccgcaagttctcctgtgagatgcagctttatagcttccattctctttccgccatttaatatacctgctgctgtattattggctttttctcccatccagccataactttgcatatacgtatcatatactatatttccactatattgtgtatcatttactctgacagctaatccctgaaccgctcttgcctgaccaattgtaccgctctgttcaccatccgcactgtatttcttccatccttgtttttctacgtatgttctatattctactttctttcctgtagtcttatacgaattatctgttgttccgggtatcgttgctccttttggtaagacagcaatttgtaatgcctcaattcgtttttcatatccctggcttccagccggctgtccattggatgtccatcccagccagccaaagttctgactatatacacgatagtatatatcataattctcggcctgacttcctgttaaactaattttcacagcctgaatatacttgctttttccttcagttcctgcgagctgccctgtttctgccagtggcttccagccttcatcctgtatacatgcctgatatcttactcctagatctccatatccgcccccgacatttattttaaacgcttccagtctttttccataacccggctttcctgtctgataaccgttatttacaggctcctgccagccataactttgcatatgcgacgtatatgtaatgatattctcatcggaaactattacccgatctgcatcttgatttatcaccggttcatctgacatccagaagttaatatctacattggtactaacaccatttacttttcccgaagacgtacactgccacatatcatactttgactgatactgacaagatgcactatactgcgcaacccatttagaccaggactcattcttaaatacccgatctgtcaatatactattccaccaatacaggctcgcataaatcccaactttatatccagccccagatatcttagaacaaaatgtatttgccaattttccaattgttgaactgccaagattcagaaccgaattctcttccatgtcaaaataaacggggtatgtcggctggtgtccttccaacattttcttaacattttcagcctctttctctactgccaaaaccgttgttgctgtagaatatatgtataccccataaggaattcccaatcgttcacattcttttacattgtactcccatttacgatctttatagcctgaaccataactgcagcggataataacgaaatcaatatccgatctgttttttaccgtatcccagttaatagttccctgatattcacttatatccattccttttttctttgcaccagggattggttttccaagactgttaacaaattgtccattgacctttttccatgcatttgtaacagcccttgcattacttgtcgcatcatcttcttgtggtattaattcaccattcgaatatctccaactattttctttcggcctgtcctcatctgtattctcactcgtctgcactttcactgaatcagagacagattcctttttttgagcgtcgttattctccggttctcctgccataacgctgattgtacctgtcgtaatatatatgacagccagcattaccgtcattatccttttcatatttccccctcaaatcatcaaattgtattatatattttactatatcatgattcttattttcttactatctttatttgcttttccggacattttcttattttctaaacacaatcactctctgtcccacataattaaacaccacgaacgctcccattccaactagcatagacagattatcctgtacacttttactctgtccgtgaagaaaccatgacacaagcggcttggcaagcccgtacgcaaccagataacagaccgtaatatttaacgcaaacttaaccagttgcttccatgacttttctttattctgaaatgtaaaatacttattcaaaaaataactcacaatactccccacaacataattggatgccgaggatatccaatagctcagatgtaacacattatatgctgcaaacattacagctgttccgaccagtgtattcacaattccaaccaatacaaatttccaaaatgttacatccagtatattttttattttatctttcattattgcttctttctccttgttcatttataaaataggcattgcatggcaatactaaaacggcctgtgttttcacacaggccgtccaatattctcttattctcctaatccatcttcgattgcactgaccatggcatccatagcctctttttcatcttccccgtcgcagataagttcgatctcatctcccgatttcacacatgctccgagaacacttaaaacgctctttgcatttgctgcaacatcttcatcatacataaactctactttgcatttgtatctacttgctatgttacagaacattcctgccggtctgagatgtaaccctgttggatttgttattgtaactttctgtctgatcataatgtactctcctcgcttctaattgttattccgtccatcttcaagcctctgtacttgttttatgattattctcttttgtttacctgattgtatctgtctttttctcatcttctttcgtctgaccttcactgctgctattttcattttgtgtcttatcattctgttttgttttttccagaataatttctacactcacattattcaccagtgaacatccgtccggaagttcaacagataccggaaccgtataagttcctgcattggtatacttcttcagatcaatactcactttctttgccggcgagaacaaattcaatgcatccccaggtccttttatctgtatctcaagatcaaccgttgaaccataactaatgctcagtccttccgctatattgtttacaacaatagaatttgtagatacttcaaatgttttcgctcccggctgctgtaccggaattgatacaaccaccttattcgcattctgttctgtcaaagacacaccacttggaatataagacgaaatatcaattgttttgtccgtcttctgtgtcagattatccagctgtaacgcacttgccggaatactgattttggaaactcctgctaatgtcgttttatctcctgtaatctcaacttcctgcggctctaccgttatttttccaaatttatacccctctgccgctgatacatctgacgtatcaacttctatcggaacacttttaacctgaagaagttctacttctacactaactccctcttttccaagattgtttgccagaagtgtctggtcaatcacattattattcgcatcatacagaaccagttttgcttccaccgtctcatcttccgaaagtcctgatacatctgcttcggcggtaactttggctatactgttgataattcgttttggtcctctaagcgttaccttttccggaaccgctttcagtgctcctacttcataaccacctcttacagtacctgttgttgtcggagtaatcgggaaattattttttgcttcctcatcaatctggatctgcagatttcttggatttgccgtcgctttctcatattttccggcataaccttcgattgttatttcgattggtacctgtgtacgaagtgtcagttctttcatatcggcagttgcctgaatatcttctgccttaattttatctaatacggatctctgcgccgtaacagttacattcacttcctgtgtattatcaacaatctgatacgtattattattatctgtaattacttcttcatgagttacctgaaccggtatatttgagaaagtcttatcgtctaccgggtcatctatatttaccacgatcagccacagaaatactgcaatcaggaaagccagtattttcagcgtaagattcttagttattcttttttgcatgctcacgccatcctttccacattgcccgtattctgttagtttcactgcttctgtgctggatttcttccagttttatcctaagctgcgcttcattaatatttctcgccagtttgcctccttgtgccacagatacagctcccgtttcttccgaaacagcaatgatcagagcatcactgacttcactcattccaactgcggcacgatgccttgttcccagatctttactgatacgcatattgtcggaaagtggaaggtaacatgttgccgacacaatcctgtcaccacggataataattgctccgtcatgaagaggggtattgtgttcaaatatattctccaacacctgactggataccagacaatccatctgaatccctgtactttcatattctgtcagtcgaattgcctgttctactacgatcaacgctcctgtctttacttttcccattgcaaagcaggctctgataatattctctctggtttcctcactgaaacgtatctctcgattctgctcaaaaggcacaaccgacgtcaggaattgcttttctcccagtttttccagcgctcttcgaagttccggctggaatacaacaatcgcagcggttgccataaccgtcagcgaatttctcgcaataaaaaggatggtatgcattttaaatatagctgcaagaagaataaatccggcaagaacgataattccccgaagtaacatccatgctttcgtattcttaatccatacaataatctgataaatcagaaatgtaagaatcaaaacctctatcacatctgtaacatgtacccttggaatatacagacctattccgtatttctctataaaatctgccactgcctgttccattcttctcacctcctctttatctgaaacatttcaactatattctatatctatctttttcttttatttgcagttttctttccacttgcatgaaattcattttcaaggctttgtgtcaaaagtaacttatctacatctttcatatcatgtttcttcggcatcggtcctctcttcggtgaatgttttttggcctgactggctcttatctgtgcaggacttctgtactccgaattattatatggtgtttttctcgatgtttcttttcttaatttgtgatttgcagacggctccacgctgattgccttagtctcttccgtaacatcctgtgaaagacgttttactgcttctgcatcaataatctctgtttcctgtctttcattgatctttttcaccgtcttctccggagttgttactgccacctttggtattgcttttacataataataatactcatcatcttcaaactgtaaccgttcacttcttgcataatcaacagagaaaaggaacagttctaatatcattccaacaattaccgcaagaatatttccgaagatcagagatccatatgatatctccactccaagtgcaatgcttcccattgccgttaccactacatcagcaattgctcctgctataatcccaattttccatgcgtgatccagttcacgtctgcggattgtataaaccacaaaaaatcctataataaacgctacaatgtaaatccacatttccttattctggaatactttctgtacataagttgtaatctcagaaagcatcgctttacttcctgatgcttttgatgccgaacttgtctttttaagatattccaccatataaaacacaactgttccgcaactcatcggcaccagacttaccggtgtatatatcagtgcacacgcaacaggtaccagaaatggtatcttcagaacaaatgcaatcggtgtaagaagtacaacaaacgccatctttggtgccagtctgatatagaaaatatacatgatcaggaaaatcattgccgatacagcaaatattcctatcgacgctgccagcgtatgtgcaagaactaataccgctgctatcacaacaatcaccatcggaggcagaaatgtagcaactacagccagtgccagagaaattaccggtgatgataacgacttcatgaatccggtattctgattgatcatcgaaaatgtgatcattgcaagtatgaactgaaaagccttgtcaaataatttagaatgttttccatagagttcttctattcttccccgtattacatatatattatccatctatcttttctccttttcatacatcttcagcaattggatcagattatgattatatctttttaccctttttcttgcttttttatgtttttcattatatatatgactggcaattccgcaatacacaatcacaacacccacataacctgccaaaatgattaaaaataaaaatatgatcaatccatttgacagattacccataatattctccacgccggcaagcaacaacacgcctaccagacatacatatccaaccgatacacttaagaatgcatagataacatgcagacttgcatagtcttttctataataagagctgatcttaaaatcttcttttccatgtgtctcttcatagagagcaagttttgtcattaattttacttttctctcatctaacatatatccacctcaacatgatattaattccattaaaacatcattttaagtataacaaatctcagtacccttgtccaatacttatggttaaaaagtaaacattctctacacctttctgtttcaatacatttgacactgcatcaattgtatttcccgttgtataaatgtcatcaaccaacaacactctctttgctgcctgaaatgtatgtttcactgcaaatgcgtgcttcagattcttttttctttcctggtgacctagttttttctgcggactggtctttctggttcttatcagacttttactgtccaccgggatttccaggatttttcctatttcttctgcaagtatctgtgcctgattatatcctctttttctctttcttgaaggatgcaacggtaccggcataataatatccggcctccatctttctatttctttttggaattcttttacaagttcctgactatataatattccgtatcttctttggttatggtacttaaattgataaacagactgatttacggggtttttgtggttccacaaactcaatccccgttcataataatgatgtgtatgcatgcagtcataacagtattcctgctctacactacggatctgttttccacattgcatacaccttggttctctgactttcagtagttccagcttctttctgcattctttgcagatgccgtctctgcatactttttggcagaatggacaaacttccggccagagcaaagatatgattgattctttaatcttattgatttttttatgattcatttaattcccggattcgctctgcaagactcgtattacggttctgttgattcgtattatgtatcatttcctgaaatacactttcacttccaatcactgtaacacactttcttgctcttgtaacagccgtataaagcagatttctgtaatatagctgtcttggtccctgtaacaaagggataataaccgccggatattcgcttccctgggctttatgaatcgttatagcataagccagttccaattcatccaacagattatacggatactttaccagcttcttttcatcatactcaacagtaaccgtttcctcatatgtattaattttacgtacgattcccatatcgccgttaaagacaccgatccccttatcaatcgtcattccatagcgagtagaaatttcccattcaagctgataattattcttaatctgcatcaccttgtccccctcacgaaacaggtgatctccgtattctttttcctgttttccaggtttcggcggattcagatattcctgtaatatcttattgattctctctacccccaacagtccttttcgcatcggtgtcagaacctgaatatccgcttctttcgcattcacaaactttggaagtttcttctggatcaatgtaataatattgctgatgatcatattcgtatcgtcacgttttaagaagaagaaatccatacttttattgtccagaacaaccggttctccccggttgatcttatgcgcattcacaataatatcactttctccggcctgtctgaatatcttcgtcagttttacaaccgaaaagcactccgaagaaatgatatctttcagtacacttcccggtcctacacttggaagctggttcacatcccccaccaggatcacacgtgttccgggtacgatagcattcagaagtgcatacataagcggcagatctaccatcgacatctcatcaataataactacatctgcttccagtggattttctgcattccgctggaagcccccgattgtctcatcatccggatttcctgacacttccagaagacggtgtatcgtctgtgcttcacagccggttgcctcagtcattctttttgctgcccttcctgtcggtgcggccaggtaaatatccagtccttcactttcaaaaaaatgtatcatagcattgatcgtagtcgtcttaccggtaccaggtccccctgtcaggatcatcagaccatgccttactgcttccattacagcagtcttttgcatatcatccagatacaactctgtatttttttcgattttattaatccggcgtattaagttagcatctgcaatttcaaaatcaagattaagatcatgcagcatttttgctgtatttaattccatataatagtaatgagacgtatatatcctcattccctgctccgacggcttcataacgatctttttttccatcgcaagatccatcaggtactgttccatatcctgaatctgaacaccaagcaattcactggtctctcttaacagtgcttcctgatacaaataaatatgtccatcattcacgctctgctgcaatgtataaaaaatcccacttcgtatacgaaaatccgaatctgtgtggattccaatctttgccgcaatctcatcagcagtcttaaatccaacccccggaacatgatccgccagctgatacggattctcctcaatcgtgcggtaaacgttacggccataatgctgatagattttcgccgcaagcgtcgttgaaattccaaacttctgcagatagatcatcgcctgacgcatatctttcttttcttccacctgagaagcaatctctcttgctttccgttcgctgattcccttgatttccgccagtctctccggctcttcttctatgatccgaaaagtattttctttaaatttcttgacaatttttcccgccagcgcggctccgattccttttatcgctccggatcctaaatatctttcaattgatatcagatcctccggttcacatacttccgattcttccacagcgaattgaaggccatacatcttatgtgttgtatagcctcctgtcaatcttaataattctccttcttctataaaatgaaaatttccgacacaggtaacctctccatccgaattattcagatggaatactgtatatccgttatcttcatttctgtaaacgatatgttctacgtatcctttaatctcttccattcgattttattcaccctggttttctagataccttttctttcgcccataaattctacatattctccagtaccgattgctacaactttcattggatcatccgctgtcatagtattaatacctgtcttttcctcgatcagctcttccataccacgcagcatggatccgcctcccgtcagcataattcctctgtcaagaatatccgcggaaagctccggtggagttctctctaacacactgattacggcttctacaatctgtccggtagtctctcgaagtgcttcttctgtctctgttgatgttaccgtaacagtcttcggcagtcctgttacaagatttcttcctctgacttccaaagtctcatcttcaatcaacggataagttgtaccgattttaatcttaatatcctctgcggttctttcaccgatcagaagattatgcttctttctcatataacgcacaattgcctcatcgaaatcatcacctgcgatcttaagtgatgtatttacaacagttcctccaagagaaattaccgcaatatctgatgttcctcccccgatatcaacaatcatattaccgcaaggttttgaaatatcgattcctgcaccgatagctgctgcaaccggctcttcaatcagatgaacttctcttgcaccagctgcataagtagcctcctcaactgccttacgttccacttctgttacaccacttgggacacagatactgattctaggctttttgaaggttctcttacctaatgccttctgcacgaaatatttaatcattttttcagttactgtataatctgaaataacaccctgtcttaatggtcttaccgctacaatatttcccggagttcttccaagcatcattcttgcttcctctccgatcgcttttatcgcatttgtatctctgtcataagctacgacagaaggctcctttaatataacaccttttccttttacatatactaatacactggctgttcccaaatcaattccaagatctactgacattcccaattctcccttcatcaagctgtctatatcattatcttttgtaagatatgatcatacgcatgctatttttgagcatgttcccattataatcaaaattatttaaaataaaaagacccattttgcttaaatctttgtgaagctttttacataaatattacaatatgacgaatctgcccgaagagatgaacaaaatgtcatatttctaccttcctaacatcggttttatatactttcctgtataagacacaggactttctgctacctcttccggtgtcccgcttgcgatcacggttccacctttgtcaccgccttccggtccgatatcaataatataatctgcagtttttataacatccagattatgctctatcacaataaccgtattaccatcagctgtcagtctgtgcagaatctctgtcagcttatgcacatcagcaaaatgcagtcctgtcgtcggctcatccagaatatagattgtctttcctgtacttctcttactcagttccgttgccagcttgatacgctgtgcttctcctccggacagcgtcgtggacggctgtcccagacggatataagaaagtccgacatcatataaagtctccatctttctgcggatacttggtacattttcgaagaaatgcatagcttcttctactgtcatatccagcacatcataaatgcttttgcctttatattttacttccagagtctctctgttataacgttttcccttacatacttcacatggaacgtagacatccggcaagaaatgcatctcgatcttgatgattccgtctccgctgcaggcttcgcagcgtcctcctttgacattaaagctgaatcttccttttttatagcctcttgccttcgcatccggtgttgctgcgaacagatctcttatgaggtcgaatactcccgtataggttgccgggttagatctaggcgtacgtccgatcggagactggtcgatattgataactttatctaattgatccagtccttcgatgcctttatgtttgcccggaatggttcttgcacgattcaggtctcttgccagacgcttgtaaagaatctgattcaccagcgaacttttccccgatccggacacacccgttacacaggtcattacgccaagcgggaagctgacatcaatgttcttcaggttattttcctgtgctccgagtactttcaaccatccggttggttctcttcttgtctccggaaccggaatcttgattcttccgctcagataggctccggttacagatttttcattctgcatgatttcttctgcatttcccgttgcaaccacttcgccgccgtgctctcccgcgcccggaccgatatccacaataaaatccgcttctctcatcgtatcctcatcatgctcgactacgattacggaattaccaaggtcacgcaaatgtttcaatgtgccaagtaatttatcattgtctctctgatgcagaccgatacttggctcatccagaatatatgctacacctaccagtccggaaccgatctgagtcgccagacgaattctctgtgcttctccgccggacagtgttccagttgctcttccaagtgtcagatagttcagtccgacatccatcagaaactggattctggaattgatctctttcaggatctgtccgccgatcagcatctgatgattcgttagcttcagttctttcagaaatgcctgcagtttctcgatcgacattcctgtcagttctgcaatattcttatctcctaccgtaacagccagtgctcccggcttcagacgctgtcccttgcaggcatgacacggtgtaatattcatgaattcttcatattccgctttcatagtttccgaaccagtctcccggtaacggcgttctacattcttgatcaatccttcaaacgcaacatcgtagacaccttctccacgctgtcccttataatatactttgacttcttttccattcgttccatgaagcagaacatcgtgaatttctttcgaatagtcttcaaatggagtgtccagcgaaaaatcgtattctttgcttaatgcatccaaaattgcataagtgaagctttttttgtctgtgcaggactgccatcccataactgtaatggcaccttcgctgatgctgagacgtttgtccgggatcatcagattctcatcaaattccatcttatatccaagtccgaaacattccgggcacgctccaaatggattgttgaacgaaaagcttctcggttcaatctcttcgatactgattccgcagtccgggcatgaaaaactttcactgaactgaaccgactctccgccgatcacatctacggtcatcagtccctctgccagattcagtacattttcaatggagtcggtcagacgctgttcgatgccttcttttactaccagacggtctaccacaatttcaatattgtgcttgatattcttatccagcttaatctcttctgaaagttcgtacatattaccgtcaattttgacgcggacataaccgctcttcttggcacgatccagtaatttggcatgggttccttttcttcctcttacaaccggggccagaagctggatcttagttctctccggcatttccatgatttgttctaccatttggtcaaccgtctgctttttgatctcgcggccacatttcggacagtgcggtattccgactcttgcgtataataaacggaaataatcatagatttccgttacggttcctacggtggatcttgggttacggttcgtagatttctggtcaatggaaatcgccggggaaagcccctcgatgctttctacgtccggcttttccatctgtcccaagaactgtcttgcataagaggacagggattccatgtatcttctctgcccttccgcatagattgtatcaaatgccaacgatgattttcccgaaccactgagtccagtcagaactaccagcttgtctcttggtatatctacatctatattcttcagattatgctcattggctcctctgattttgatatattgtcttgaatctttttcctgtgacatgtgagtatatactctcctttttctatatctttatttcctgcagtgtctttttaagctcaattaacttatctctgagttctgctgccgcctcaaagttcaggtctgccgctgctttcttcatctgtttttccagttctttgatcagtttctctaattccttctcgctcatagattccggatctttttccatctgcacttcagaggctgccaccttcttggatacagcgatcagatctcgtaccgctttctggattgtcttcggtgtaatgccatgttcctcattatatgccatctgcacttcacgtcttctctgcgtctcatccagtgccgcacgcatagaatctgtgatcgtatctgcgtacatgatgacatgtccttctgcattacgcgctgcacggccgatggtctggatcagtgatgtctcggaacgcaggaatccttctttatctgcatccagaattgcaaccagtgtgatttccggaatatccagaccttctcgcagaaggttgataccaaccaatacgtcaaatacatccaaccgcatatcccgcacgatctcggtacgttccagtgtatcgatatccgaatgcaggtagcgcacgcggattcccagctctctcatatagtcagtaaggtcttctgccatacgtttggtcagtgttgttatcagtattttgtgcttattggcaatctctttattcacttctccgatcagatcatcaatctgtccttctaccggacgaacttccacttccggatcgagaagacctgtcggacgaattacctgctcggctcttaacagttcatgttcttcttcatatttgcccggtgttgcagatacaaacatgacctgatcgatcttgctttcaaattcgtcaaagctaagtggtctgttatccagtgctgacggcagacggaatccatattctaccagtgtacgttttctggactggtctccatgatacatgccgccgatctgcggaaccgtcttgtgcgactcgtcgatcataataataaaatcatccgggaaataatccatcaatgtgttcggcggctgtcccggtgcaagtcccgctaaatgtcttgaatagttctcaattcccgagcagaatcctgtctcacgcatcatttctatatcaaaattcgtacgttctgcaatcctctgcgcttccagaagcttgccttccgatttgaaatatttcacctgttcttccagttcaatctcaatattacgaatcgctttctccatacgttctttcggaacaacatagtgagaagccggaaatatcgcaatatgattcagcgtatttttcacttcaccggtaagcatgtctatttccgaaatccggtcaatctcatctccgaaaaattccactctaatagcagtatcgccacggtctgccggtacaatctctaccgtatctccccgtacccggaatgttccgcgcttgaaatccatgtcatttctgtcatattgaatgtctatcagctggcgcaacacttcatcacggtctttctccatacccggacggagcgataccatcatctgttcgaagttttccggttcaccaagaccatagatacaggaaacactggcaattacgatcacgtctctccgctcgatcaatgctgctgttgccgataatctcagtttatcaatttcttcgtttacagaagaatctttcgcaatgtatgtgtctgaggatgggacgtaggcttccggctggtagtagtcgtagtaggagacaaaatattccactgcgttatcggggaacatctccttgaactctccgtataactgagctgcaagtgttttattatgagcgatgacaagtgtcggcttctgtaattgctgaatcacatttgccatcgtaaaagtttttccagaacccgtaacccctagtaaagtctggcattgattgccttccttgaaccctttcacaagctctgcaatcgcctgtggctggtctccggtcggcttatatggggcttttaatttgaactcattcatggtaaatccctccatttgtgacttttactatgatcattatcagcctgactctcttagtggttcttatggtatggaacctgaacaagaagccttatctattgtttccttcaaggactgagaggccgtttctccagttaataaattaaatcccaagcttattttatatcagaatatacgatgtttcctccgcagatcgtatatttcaccttaccggtaagttcctctccggtaaatggtgagtttgatgatttggaagcatattctttcgggatccatgtttcatcagggtcaaatataacaaagtctgcatctgcaccttcctgaattgttccgtaaggcagatggtatagctttgccgggttcactgtcattttttccagaagttgtatcatggtcagatatccgggctttacaaggttggtgataccgagtgcaagggaggtctcgagaccgataatgccgcttggggcttctgtgatcggtttggatttttcttctgtgctgtgtggggcatgatccgtagcaatcaggtcaatagttccatcagcgagtcctgcaataatctgctggcggtcattttccgtacgaagcggcggattcatctttgccagcgtgccatgttccaaaacagcgtcttctgttaaggagaagtggtgcggtgttgcctcagcgtgtaattttgctcccagttttttgtatgtacggatcagatcaatcgatacaccggaactgatatgctggattacaacatctgcaccggaacggagcgccagaagacagtctcttgccaccagtgcttcttcggcaatggatggagaaccgtagatgccgagtgcatcggatactttgccatgattgattccattgttgcggataaaagccgggtcttcttcgtgaagactgatcggaacgtttaactttgcggcatttttcatcgcctgatagcagaactcagcattcagaagagggatgccgtcatcggtaaatccgcatgccccggcttcttttaatgcaagcatgtctacttcgtcccggccctttaatgaacgggagattgcagcagcctggaagatacggatatcttctttggaagcacgtgcaagattatcttttagggtgtctgtattgtcgaccgtaggggatgtattcgccatacagattacagtagtaaacccgccttttgcagatgcctttgctcctgtatggatatcttctttatatgtaaatcccggatcacggaaatgtacatgtgtatcgatgagtcccggtccgacaacgagtcctccggcttctagaatctcctcggaatcttctgaaatttcaggtgcgattcttgcaatttttccgttcttcaccagtatatccatatgctcggacagaccagatgcaggatctaccacaagtccatgtttgatgatcatgataaatttcctccttaaaaatctgatgttaaaatacagtaaatattataaatgtagtataatgtattggaaatgggcttgtcaattaagagacatggaacaggaaagctgaatatatgagtaataaaaggagcacgtagaacagaaatgggatttaaacgtttggaaaaaaatttgatcgatattataaaagaagaacaggcaaaacttggatttcgaaaagaagagatccgtttgtattatccattgatttccctcaatcatttctttgaggcggatgacgatgtggatgagatgcagacacgtctggaacagttcccggaagaagtaaagaaaaaactcggagatatctgtgtaacgcacaaaaaagacagattctgcctgcatattccggaacagggaagtgtctatgtacatgaacatacggcagaaaatgaattcatcaaaaagctggtggagctgatgatgaatcacggaatcaaaaaagaagatatccttgcgatatttcagaaagaggcaaaagatatcagggtgggagatatgcacaacggagaatttgacttttgggtaagatttccggaagaaaatgaggacgaatactattactgctttaaggacgaagggtgtcatatgatctatcatcgttttttgccggaagattatgcagatttcggattctgaaaggcagtcggaaaaggataaaaatacagatgcagacaggaattataattataacttataaatgctgcctgcatttttaattataaaatatcttgctatatgtaaagattcatgataagctatcctacatcgtgctaaagtaaagacgtgctaaagcgatttgggtgaggatttattctcaaaataatgacaattactttgacgaatttgctgcaatgcgattacgttatcataaaaaactcaggagagtcttttcgtaatgaaatgaaaagcgccgaaggtgtaagcagaaaacagatctgcaaatctctcaggcaaaaggatggaggaatgaattatgggaatttttggacgtattgacacttttatcacatggtttgacggagtcgtatggggacttccgttaatcatcttaattctggtcacaggaatttttctgactgtgcgcttgggccttcttcaggtaaggtatcttgggaaagcgttaaaattcatggtgaaaaatgaagaagatggacacggagaagtaaccagctttggagctctttgtaccgcattatcggcaacaatcggtaccggtaatatcgtcggtgtggcaactgcaatttctgcaggtggaccgggagcgttattctggatgatcctgacagcatttttaggaatggcaacaaagtattcagaaggtcttctggcagtaaaataccgtacgatcgatgaagacgggcatgtacttggcggaccattctattacattgagaatggaatgggtgtaaagttcagatggcttgcaaagatatttgcattctttggagcaggggttggattattcggaatcggtacatttacacaggtgaatggtatctcatctgcagtccgtaacttttttgatccgaacatggcacatacagtagcattatttggaaatgattattcatgggcaactgtaatatcctgtctggtactgacggtatgtgtcggaatggttgtattaggtggaatcaagagaattgcaaaagtatctgagatcgtcgttccgttcatggcggttctgtatgtagtattggcagtcattatcatggtgacaaatattaccgcaattccggcagctattgtaacaattgtaaaatcagcatttaccggaagcgcactggccggtggtgcaatgggaagtatgatcgtagcaatgcagaaaggtattgccagaggaatcttctcgaatgaatccggacttggaagcgcaccgatcgcagcggctgcagcacagaccaaagaacctgcaagacagggactggtgtcaatgaccggtacatttatcgatacgatcgtaatctgtacgatgacaggactttctattgtcattacaggaacatggaatacgggactggaaggtgtggaaattacgacagcggccttccagaagggacttccgttcccgccggttgtggcatcctttgcattgatgatttgtctggtattttttgcatttacaacgattcttggatgggattattacggagaacgctgcctggaatatctgtttaataagaatatgaaagctgtaagagcgtatagatggctttatattatatgtgtattcatcggaccatatatgacggttgcggcagtatggaatatcgcagatatcttcaatgcattgatggcaatcccgaatctgatagccttgcttgcactcagcaaagtcatagtaaaagaaacgaaagcatttacggaaaagctgaatgtggaagagaagaatcagagaattctcaaaggaatgaatgcagagaatgcataatagaatataagttctgtagagcatatggtgataaaatacaggaattttgctataagaagcagaatccctgtatttatttttgccctcttattttgatagaaaaaatatgctggatgcagaatttataaaaggtcatacttttctttaaaagtccgtattatttctaaaataaaacaaaatacatacaatatttgtgtaaatttgtgcaaaatgtgttaaaatgtaagaaaacaaaggacaggtgcaaaaatgaagaaacaaaagaaagatccattgtataaaagcttcggttatgcatttgccggaatatttgcagtggtaacgaaggaacggaatatgaagattcattgtgtggcaatggtttgtgtggtgatcgcaggattcgtatttcatattacaccggtagagtggtgtatctgcctgacattgtttggtcttgtcatggcattggaaatggtgaatacggcggtagaagcagtggttgatctggttacggaagagagaaagccgcttgcaaagcttgcaaaagatgcggcggccggagcagtactgatcgcggcaatcatggcagcaattgcagggatgatcatatttattccaaagcttttggaaagcctgtctatatagacatcgaaaggagaacgacctatggaaaaattaggaagcggattaaagaaagtattacttgcaggaatcggagcagttgcagtcacaggagagaaatcaaaagaacttctggatgagatggtgaaaaagggtgagctgactgttgaacagggcaaagcactgaatgaagaacttaagcataacatcaagtcgacagtaaaagaaaaagtgaatgtaaaagtaaaaacatcttcaccggaagaactggatgagcttttggataagatgactccggaacagagggcattgttgaaacagagaattgatgagatggagaaaaaacaggaagaatttgaagcagcagagacggtagaagatgtgacagacgaatccgtatgcgaagatgcggcagagaaagcagcggaagaagagacagctgagaacgaagatatttaaagaggaacaggttcatgagtaagggagaatccaaagaataccgtaccaggttaaaggagattacatccgtacttcataaatatggaatcaccaggggaattacgcctcagaaactccggatgatactggaggatctggggcctacttatattaaaatcggtcagattatgtcactgcattcagacattttaccgaaaagatattgtgatgaactgatgtgtctgcgttcagaagtaactccgatggaattttcggaagtaaaagaagtgatcgaacgggcatatggttgtccgtggaatgaaatatttgcatttatttccgatacaccactgggatcagcatccattgcacaggtccacagagcagaactgctcagcggtgaacaggttgttatcaaggttcagcgaacaggcatttatgaaattatggcaagagatatcggactccttcggaaggcagtaaagctgatgccgccgatcagtctgaaaggaatggctgacttcgaccaggtactggatgaactttggaatgtgacacgggaagagatgaattttctcaccgaagcatcgaatatggaagagtttgccagacggaatgcggatgtcgtatatgtaagaacaccgaaactatatcaggaatatacaaccatgcatgtgctggtcatggaatacatcgaagggcctgcgatcgatgataaagagaaacttctggcaggcggatacgatctggaagagatcgggatcaagctgatcgataattatatcaaacaggtgatggaagacggtttcttccatgcagatccccacccgggaaatgtaaagatccaggatggcaagattgtatggattgatatgggaatgatgggaagactgaccgaacgggataaagaactgatcggaaaagcaatccgcggcattgcagaaaatgatatcggcatgatccaggaagcagtcatggcactgggtgaatttaaagagaaaccagatcagagcgtattgtatgaagatatcagtgaactgatgtcgaagtatgggtccttagatatgggagagatcgatgttgcagaagtgatgatggatcttatggaagtgatgaaggaaaataagatccgtatgccgcatggtctgacgatgctggcaagaggattgactaacatggaaggcgtgcttgcagacattgctccacagatcaatatgatcgagatcgcatccagacatatttcagagagtatgtggaaagatctggattggaaaaaagaattaaaacatgcaggaaagaatctttaccgttcgatgcataaagcagtagaagtcccgggacttgcagcggatgcactgcatggtctgatgaaaggtcagacaagagtcaacctggatctgcatgcatccaacgatctggcacagttactgagacgtctggtgcggaatgtggtaatgggattgtgggtgatggcattgctgatcagttcaagcattatctgcactaccaatatgagcccgaagatctgcgggatcccggcaattggtgcgattgggtatttatttgcatttgcgattgtgatgtatgtgcttattaagcatattctttccaaatgaatttgagatttattcttggttttatgggcaaatatgccgacaaaatgatacgagaatctgtatttgtaccaaaaaatgaacaaaataacagtcggaatcgctagacttttgatgatacaggagatataataaaatcatacacgtcaatatatgatttgtactattatcaaggaggaacaacgaaaatggcaagaaaaatgaagaccatggatggtaaccaggccgcagctcatgcttcatatgcatatacagaagttgcagcaatttaccctattacaccatcatccgttatgccggaacatgtagatgaatgggctacagaaggaagaaagaacatatttggacagactgttcaggtaacagagatgcagtcagaagctggtgctgcaggagcagtacacggatctctttctgctggtgctctgacaacaacatttacagcatcacagggacttctgttaatgattcctaacttatataaagtagcaggagaacagcttcctggagtatttaacgtatccgctcgtgcgcttgcaagccacgcactgaatatcttcggagatcactctgatgtttacgcctgtcgtcagactggtgcagcaatgctttgcgaatccagcgtacaggaagttatggacttaacaccagttgcacactgcgcagcattaaaaggaaaacttccatttatcaacttcttcgatggattccgtacatcacacgagattcagaagattgagacatgggattatgaagatttgaaagatctggtagatatggacgcaatcgatgcattcagaaatcatgcactgaatccaaatcacccatgccagagaggttcagctcagaacccggatatcttcttccaggcaagagaagcatgtaacccatactacgacgctatgccggctatcgtacaggagtacatggataaagttaacgagaagatcggaacagactacaaactcttcaactactacggagcagcagatgcagagaaagttatcattgctatgggttctgtatgtgacacgatcgaagagacgatcgactacttaacagcagctggggaaaaagttggtgttgttaaggttcgtctttacagaccattctgtgcacaggcattaattgatgcaattcctgacacagtaaaatacatcaacgtacttgacagaacaaaagaaccaggagctcagggagagccattatacctggatgttgtttctgcattaaagggatctaagttcgacgcagtaccggttaacggcggacgttacggattaggatctaaagatacaacacctgcacagatcgttgcggtattcaacaacgcagacaaagaaagattcacaatcggtatcaacgatgatgttacaaatctttcacttgaagttggtgcaccactggttacaacaccagaaggaacaatcaactgtaagttctggggacttggagctgacggtactgtaggagctaacaagaactctatcaagatcatcggtgacaatactgacatgtatgcacaggcttacttcgactatgactctaagaagtctggtggtgttacaatgtctcacctgcgtttcggtaagaagccaatcaaatctacttacctgatccacaaggctaactttgtagcatgtcacaacccatcttatgtaaacaaatacaacatggttcaggaattagttgacggaggaacattccttctgaactgctcttgggacatggaaggtcttgagaaacatttaccaggacaggtaaaagcattcatcgctgatcacaacatcaagttctacacaattgatggtatcaagatcggtaaagagatcggacttggcggacgtatcaatacagtccttcagtcagcattcttcaaactggcatctatcattccggaagaagaagcaatcgatctgatgaagaaagctgcaaaagctacttacggaagaaaaggtgacaagatcgtacagatgaactacgatgctatcgatgccggtgctaaacaggtagttgagatcgaagttccggaatcttggaaatcttgtgaagacgaaggattattcacaccagaagttaagggtggaaaagacgatgttgtagcattcgttaagaacatccagtctaaggttaatgctcaggaaggaaatactctgccagtatctacatttactgactatgcagatggatctacaccatcaggtagtgcagcatatgagaaacgtggtatcgcagtagatatccctgtatggcagtcagaaaactgtatccagtgtaaccgttgtgcatacgtttgcccacatgcagttatccgtccggtagcacttacagaggacgagcttgcaaaagctccagaaggaacaaaagctatcgatatgatcggtatgccaggaatgaaattcactatgactgtatcagcttatgactgtacaggatgtggatcttgtgtaaacgtttgcccaggtaagaagggtgaaaaagctcttgttatggcaaacatggaagaaaatgcagcagagcaggatatctttgatttcggacgtgagatcgaggttaaaccagaagttgttgctaaattcaaaccagagacagttaagggaagccagttcaaacagccattacttgagttctcaggagcttgtgcaggttgtggagaaacaccttatgcaaaactgatcacacagttatttggtgacagaatgtacatcgctaatgcaacaggatgttcatcaatctggggtaactcttcaccgtctacaccatacacaataaactctaagggacagggacctgcatggtctaactcactgttcgaagacaacgcagagtttggatatggtatgttacttgctcagaaagcaatcagaaagagactgaaagaagaagttgaaactgttgcagcatcagagcaggcttcagcagaggttaaggcagcttgccaggaatacctcgatacattcgcatgtggtattacaaacggagatgctacagataaattagttgcagcattagacggatgtgactgcgatacatgcaaagacatcgttaagaacaaagacttcctcgctaagaaatctcagtggatcttcggtggtgacggatgggcttatgatatcggattcggtggagttgaccacgtattagcaagtggtgaagacatcaacatcatggtattcgatacagaggtttactctaacacaggtggacagtcttctaaggctactaagactggtgctacagctcagttcgcagcaggcggaaaagagacgaagaagaaagaccttgcaagcatggctatgagctatggatatgtatacgttgcacagatcgctatgggtggagacttcaaccagactgtaaaagcaattgcagaggctgaggcttatccgggaccatctctgattatcgcatacgctccatgtatcaaccatggtatcaagaagggtatgagcaaagctcagacagaggaaaaattagcagtagattgcggatactggaataacttcagattcaatcctgcagctgaaaagggaagcaaattcactcttgacagcaaacagcctaaggaagaagattatcaggcattccttgacggagaagttcgttacaacgctcttaagagagctaatccggaaaaggctgcaagactcttcgctaagaatgaggcagaggctatggagagatacgattacctgtctaaactgacagacctttacaaagtagaggagtaattgttatctgatcagcaatagaatagtataaatcaaaactcccgcagatccgaaaggatctgcgggagtttttcgttgtcatgcattcgccatattgtattgacaaaatagatcaaagatgataaaaatattattatatgaataatgagactagatagaggcgcaggtttcatcagtaaggcagaacaacagataaagggaaatcatttctgcctgaaagggaaaactgccgaaggaagatatcatcccttattatattcgagatatacttcctgggacgcagcagaatatgctgcggactgtcacttcagtaagtggagcgctatcggagtatatagaagatataagagtttaattatgtaatttgtatttagagttatatagaggacataaatgaagtgttgaatgatatgaaaatacggatgtcctgcttataagatgatatatgccatgagcaatccacgcagaggaaattgttcatggtatttttttggaacaaaacgaaggagaaagagttatgagaaaaagaaaaaaattactctttgccgtactcacctgcctcatgatctttgcatgcggtgcaattaccgtatttgcggcagatggaggaaaagagtatgtaccaaagatgtattcatcattctgggcactggtacccccaattgtggcaattggtcttgcactgatcacgaaagaagtgtatagttccttgtttgtcggaattgcgatcggaggaatcttctggtctaatttccattttgaaaaggcagtattgcatatatttgaagatggaatcgtaggagtactgacagatagctataatatgggaatcctggtattcctggttattcttggaattatggtctgcatgatgaataatgcaggaggttcggcagcatttgggcgttgggctagtattcacatcaagacaagagttggggcacagcttgcaacgatcgtgcttggaatcctgatctttattgatgattattttaactgcctgacagttggaagtgttatgcgtccgatcacagataagcacaatgtatcacgtgcgaaactggcgtatctgatcgatgcgacagcggcaccggtatgtatcatcgctccaatctcatcatgggcagcggctgtaacaggatttgtaaaaggtgaagatggattttctatttttatgcgtgcgattccgtataactattatgctttacttacaattcttgcaatggttttgatcgtagtgcttaagattgattatggcccgatgaaattacatgaagataatgctgtaaagggtgatatctatactacaccggacaggccatatgcaaatgctgagaatgagatcgtagaagaaaaggggaaagtgatcgatctggtattcccgatattgatcctgatcattttctgcatctgcggtatgctttatacaggaggcttctttagtggaacaggctttgttaaagcattttcggcaagtgatgcatcggtaggtctgatgcttggaagtttcttcgcattggttgttacggttgtattctatgcacttagaaaagtacttaagttccgtgaatctatggaatgtgttccggaaggattcaaggctatggtacctgcaatcctgatcctgacatttgcatggacattaaaagcaatgacagacagtcttggcgcagcagagtatgtggctaatgttatgcagtccgcagctggaggattattaaacttcctgcctgcaattatcttcctcgtaggatgcttccttgcatttgcaactggaacatcatggggaacattcggaatcctgatcccgatcgtagtagcggtattccagggaacgaacgagactatgatgatcatctctatctcagcttgtatggcgggagctgtatgtggagatcattgttcgcctatttcggatacaacgatcatggcatccgcgggagcgcagtgtaatcatgtcaaccatgtaacgacacagttaccgtatgcggcaaccgttgcagttgtttcctgcattacttatgtaattgccggatttgttcagaatgcattgatctgtcttccgatcggtatggtacttctggtagcagctttactgctcatgaagaagagaacagaaagccattcataaatgatttgttaaaaaaataaaattagcagagacttcaaagactctttgccttgcataaaagtatgtggcgcaaaagttgctttggagtctttttttgataggtgcagaataataagaaaggtgttataatatcttgcatgagtggcaattattccagtagatatattgcggggcagaagaatcttctgctttggggaaatggaagattgcagacgaaaggagaacatagaaattcatgagtgtaaaagacttaagtgcttacgaattagtaaaggaagaagatttaaaagggatcaaatcccacggaatgctgttaaagcataagaagagcggggcaaggattttactgatagaaaatgatgatgacaacaaggtattcaatatcggattccgtacaccgccgtcagacagtaccggagtaccacatatcatggaacattccgtactgtgtggatctaagaatttcccggcgaaggatccgttcgtagaactggtaaagggttcactgaatacatttttaaatgcaatgacttatccggataagacggtttacccggtagcaagctgcaatgataaggatttccagaatctgatgcatgtatatatggatgcggtattctatccgaatatttatcagcatgaagagatcttccgtcaggaaggctggagctacaagatggattctctggaagatgatctggcttacaacggtgttgtatataatgagatgaagggagcattctcttcaccggaaggtgtgctggacagagtggtattgaatacactgttcccggatacctcatatgcgaacgaatctggcggggatccggaagtgattccggaacttacgtatgagcagttcctggatttccacagaagatattatcatccgtcaaacagttacatttacctgtatggaaatatggacatggaagaaaaattaaactggctggatcaggaatatctgagcaaattcgactatgcgccggtagattccaagatccgctatcaggaaccatttgataaagtaatcgaaaaagagatgccatattccatagcaagcgatgaatcagaagaggataatacttacatttcttacaataaagtcattggaacaagcttggatgagaagctgtatctggcatttgaagtattggattatgcattgttatctgcaccgggagcaccgcttaagagagcacttacggatgccgggatcggaaaagacattatgggatcgtatgacaacggaatttaccagccgatcttttctgtcattgcgaagaatgcgaatgtagaacagaaagaagcatttgtgaaagtaatcgaggatacattaaaagatattgttgaaaatggaatggataagaaagctctcgaagccggaatcaattataatgagttccgttacagagaggcggatttcggaggttatccgaagggactgatgtacggactgcagattatggacagctggttatacgatgacgaaaaaccatttatccatatcgaagcgctggatacattcgagttcttaaaggcacaggtcggaacaggatattatgaagaactgatccgcaaatatctgttggagaatacgcacggtgcgattgtgctgatcaagccggaaaaaggacgtactgcaagaatggacaaagaacttcaggagaagttgcaggcatacaaagaaagtcttacagaagaagaaagaaaagaactggtagagcgttccaatgcattagaggcatatcagtcagcaccggatgcagtagaagatcttgagaagatcccggttctttcaagagaagatatttcaaaagagattgagccaatcatcaatgaagaaaaaagaatcgcagatgtaccggtagtataccatgagattgagacaaatggcatcggatacgtggatgtgttattcgatatgtcaggtgtggaagaagcagatcttccgtatgtcggaatcctgcaaggagtacttggagtcattgataccgagaattataagtacggagaactctttaatgagatcaacgtgcataccggcggtatcggaacatcactggaactgtatacagacatttccaaagtgccggaaaaagaattcaaagcaacatttgaaatcaaaggaaaggcattatatcagaagctgccagtcgtattccggatgatggaggagatcctgacacgttcgaaactgggagataccaagagaatcagagagattcttgcgatgcaaaagtcaagacttcttatgaaattccagtcatccggacatacaacagcagtgcttcgtgcgatgtcttatgcatctccgtcatctaagttaaaagacatgacaagcggtatcgagttctatgataagatcgcttatatcgaggaacattttgaagaagaaaaagacgtattggtacagaagcttcagatgctggctcataagctgttccgtgcagacaatatgatgatcagttacacggctgcaaaagagggcctgaacggcatggaagagctggtagaaggtctgaagaaagcaatgttcgaagatccggtggaagataccagatgcgtactgcactgtgagatgaagaatgaaggattcaagactgcttccaaagttcagtatgtggcaagagtcggcaactttattgataacggggcagattatacgggtgcattgcagatcttaaaggtgatcttaagctatgattacctgtggcagaatgtccgtgtcaaaggcggcgcttatggttgcatgagcggattcagccgtaccggagagggctatttcgtatcttaccgtgatccgaacctggaaagaacgatggaagtttacgaaggcattgccgattatctgagaaactttaccgtcagcgatcgtgatatgaataaatatattatcggaactatgagtaatattgaccagccgatgacaccgtctgcaaaaggagaccgttcgttcaatctgtacatgaataaagtcagtgcagagacaatcaagaaagagcgtctgcagatccttaaggcaggacaggaagatatccggaaactggcggatgtcgtagaggcagtgatgaaagccggacaggtctgcgtgatcggaagcgaagagaagatagaagaagcaaaagatatgtttaaaaatgtgacgacattttagttgtcttcaacagataaaagaacaggagaaaatatgaaaaaggattataaatcaggattcgtaacattgatcggtcgtccaaacgttggaaaatcaactctgatgaaccagctgatcggacagaagatcgcgattacatcgaataaaccacagacgacacgtaatcgtatccagaccgtacttacaacagatgacggtcagattgtgttcgtggatacaccgggaatccataaagcaaagaacaagcttggggagtatatggtcaatgtggcagaacgtacattgaatgaagttgacgtggtgctctggctggtagagccgacaacatttatcggagcaggtgaacagcatatcatcagccagcttaaaaaggtaaagacaccggtcgttctggtcatcaataagatcgacagcgtgaagaaggaagagattcttccttcaatcgctgcgtacaaagatgtctatgactttgcagaaatcgttccggtatctgcgagaaacggtgacaataccgatgagcttgtaaaagtgatcatgaaataccttccgtacggaccacagttctatgatgaagataccattacagatcagccggagcgtcagattgtggccgaactgatccgtgaaaaagcactgcactgcttgcaggaagagattccgcatggtatcgcagttgccatcgacagtatgaaagtcagaaataaagtgatgcacatcgatgcaacaattatctgtgagcgcgattcacacaaggggataattattggtaaaaaaggaagtatgttgaaaaagatcggaagtactgcacgttatgagatcgagaaaatgctggatcagcaggtcaatctcaagctctgggtcaaagtaaagaaagactggagagacagtgaattcctgatgaaaaattttggataccgcgaggacgaataaaaagcagtatccatgggagaacctaatcttggagcattagaaaaaatatgccctggcaaaggatgaggtgatcatatggaagagtactgggacagattcgtcacaacgggaaagatagaagattatctgtattataagggaatgcgtatctgtgaggagacgatgaacagatacaaagaaggagatacaattggtaaatcagattacactgactggcatgatactgacagcagcaccgataggtgaatatgacagacgagtggtaatactgaccagggaaagagggaagatctcggcattcgcacgcggtgcaagaagaccgaacagcgcactgatgggagtgacgagccctttttcttttggagagtttactgtgtatgaggggcggacatcctacacactggtgtcggcctctatttccaattatttccaggaactgcgtacagatgtagaaggtgcgtattatggattctattttatggatctggcgggatattatgcaagagaggcgaatgatgagacagagatgctgaaacttctgtatcagacgctgcgagcgttgacgaatgtacatattccgaatgaactgatacgatgcatctatgagttgaagacaattaccgtgaacggggaaggaccgcaggtgatggaatgtattatgtgtggggacagagagcgggagaaagtgttcagtatacggcggggtggtgtgatatgcgcgcagtgtgccggacatatttccgatggaatccggctgcttccgtcgacattatatacactgcagtacatcgtgtgttctccagttgagaaactatatactttcgtggtaaaagaagatgtgctgaaagaactgaagaaacttacaaaagcatatctggatgaatatctgggaaaacgcttcaaatcattggagatattggaaacaattgtgcgataaggcttgaaaacaaagaagtcagacgctataattaattacaattatgaatatttttagaaggtgaggataaaaaaatggcagaaaagactatggataagatcgtttcattggcgaaagcaagaggatttgtatatccgggatctgagatctatggcgggcttgcaaatacatgggattatggtaatctcggagtagaactgaaaaataacgtaaaaagagcatggtggaagaaattcatccaggaatctccatacaacgtaggagtagattgtgcgatccttatgaatccacagacatggatcgccagcggacatcttggaggattcagcgatcctctgatggattgtaaacagtgtcacgaacgtttccgtgcggataaagtcatcgaagattattgtgcagagaataacattgaactggatggtgcggtagatgcatggacacaggaacagatgaagaacttcattgacgagaagcagattccatgcccgacatgcggaaagcatgattttacagatatccgtcagttcaacctgatgttcaagacattccagggagtaacagaggatgcgaagaatactgtatatcttcgtccggagacagcacagggaatctttgttaacttcaagaatgtacagcgtacatccagaaagaaactgccatttggtatcggacagatcggtaaatcattccgtaacgagatcacacctggtaactttacattccgtaccagagagttcgaacagatggaactggaattcttctgcaaaccggatacagaccttgagtggttcgactactggaagaagttctgtctgaactggctgtcttcattaggtctgaaagaagatgaggtacgttaccgtgatcacgataaagaagaactttctttctacagtaaagcaacaacagacgttgaattcttattcccattcggatggggcgagctgtggggaatcgcagatcgtacagattacgacttaacacagcatcagaatgtatccggacaggatctgacatattttgatgatgagacaaaggaaaaatacattccatacgttatcgagccatcacttggtgcagaccgtatggtacttgcattcctttgcagtgcttatgacgaagaggaaatcggaacggaagaaaaaccggatacacgtacagttcttcacttccatccggcacttgcaccggttaagatcggtgtacttccactttctaagaagctgaacgagggcgcagagaaagtatttacacagttaagcaagaaatacaactgcgaatacgatgatcgtggaaatatcggaaaacgttaccgtcgtcaggatgagatcggaacaccattctgcgtaacatatgattttgattcagaagaagacggagcagtaactgtccgtgacagagatactatggaacaggaaagaattaagattgaagatctggatgcttatttcgagaagaaattcgagtggtaagaatcagaaaattgaagcataagagataaaacaagagaccgtggaatcggctatgtatgccaaagtgtatgcatggcggtttcacggtcttttttttatatatgcaggtatgtagaaattgatttgtgcataatgtacaaaaaaataaaatataaaataaaatattgattaaaaataaaagaaagagtatatttatagaaaacacctgattcattattcgtaaaatctataagtaaggaggaaagactttggataaactgaataatatcgtattactgattcagcattatctggcagattatattttgatcattctgctgttaggaggaggtgttatatttacgatccggctcggatttatccagatacgtggatttaaggccgggtggaaaagaacgtttggcggactgttttcgaaaaaaggaacggcgggaaaagacggtatgtcatcatttcaggcacttgcaacggctattgcagcacaggtaggaacggggaatattgcaggagcggcaacagcattggcaataggcggaccgggagcgattttctggatgtggattgcggcatttcttggaatggcgaccattttcggagaagctattatggctcagaaatataagcatgtaggaaaagacggacatgtaacaggcggaccggtttattatattcaggcggctttcaaaggtacttttggaaaaatcctggcagctgtcttttctgttctgatcatttttgcactgggatttatgggaaatgcggtacagtccaactcgatagcgtcagcatttcatactgcatttggtataccacagatagtggtggggatcattatagcggttatcgcattgtttgtatttgtcggaggaatttccagaattgcaaaagttacagagacgattgttccaatcatggcatgtttttatattatcggatcactgattgtaatctttgcaaactttaaagaaatcccatatacattttattctatcgttgtaggtgcttttaaaccgtctgcagtcagtggcggagcagtgggagcaacggtaaagcttgcactcacaaaaggtgtggcaagaggactgttctcgaatgaagcaggtatgggatcgacgcctcacgcacatgcggtagcgaaagtagaacatccggtagagcagggatttgtagcaatgatcggtgtattcattgatacctttgtaattctgaatctgacggcactggtgattattacaacacagtcgattccgacagggcttacaggtacagcactcagccagtatgcattttcgagtgtattcggaaaattcggtaatgtatttattgcaatctgtatgttctttttcgcattttcgacgattatcggctggtatttctttgggcaggccaatgtgaaatatttatttggaaaaaaggcagtaaagccgtatgcagttctggtttcgctctgtgtattgttaggttcacttgcacaggttgatctggtatggaatatggcagactgtttcaattcattgatggtaattcctaatattcttgcattgttcttcctgagcagccagatgaaagaactgcatgacgattactatcataatttcttaaaaaataaaaaagtaaaataaagaaaaaagactttgtgaataatgaataggtgaaaacgaaaaaacggaggaaaaatagaaaaatatacaaaaagcagatcacataattgttcaaaacaactaaaaaaagataaagtattgcaatataagtaacaatgatgtaatatagaagaaggaaataaatgatataaaaattttctataactgaaaagaagagtgggatgatatttctcaagagagagctgccagggcagccgccgaagaggcaaaccggtatcgaaaaaaatgggaaaaaaccggacgaaactttcaggcaaaaggacggagaaaggtactacattctgaatcttgtactgtaagaggaattagattttacaggacaaaagacagaaaaggacgtttgaacgcagtaactggcgtgggacgtcctttttattttctaaggctggttgaaataacataagagaggatggacatgaatgagtaagtatatggtgatcacaaataatccgcttgtacgatccaggctggatgatacacatgaggtaatctatctggaactctcttatgaagaacttctgaaggtagtaagggacagaatttacgaaggtcacagattattgacacatccattatcaggaagtgtaaaaccaaaggaaacaccgtacaaatctgtgctgatatctgagagaaaggagaaggtggatggggaatctgtcagattgattgaaaatgcgattctggtatgtcagaaatttcaagataaaagtaagtattacaaagaagaagtttataaggattttcaattggttgactggactttattagagagtggactggcgtctgcggatgtctggtagaagactgtgataaaagaggttgtaaaacgggcagcgttttataaaagaagatgaaaagaggaggaaaagatcgtgagattagaaatggggaatatttacattaaggatatccagtttgcggatacatcaaagattgaagatggaatcctgtatgtagataaaggagctgtaaaagcggtagcattggaagatgagcatatcaaaacagtcacttttgatattgcgaaaccaggagaatcagtaagaatcacaccggtaaaagatgtgatcgaaccaagagtaaaagttgagggaaaaggcggggtattcccgggaattatttcaaaagttgataccgttggttctggaaagacatatgcattaaaaggaatggctgttgtaacagcaggaagaatcgtcggtttccaggaaggtatcattgacatgaccggaccgggagctgattacacaccattttccaagacattgaatctggttatggtatgtgaacctgtagaaggtatcaagcagcatgaatatgaaaaagcagtccggtttgccggattccgggtagcagcttacattggggaattagcgcgtgagcttacaccagatgagacaaaagtgtatgagacatgcggtatcaaagaaggaatcacacagtatccggatcttccgagagttgcatatgtccagatgcttcaaagccagggactcttacatgacacttatgtatacggagtggatgcaaagaagacacttcctacaatcttaagtcctacagagatcatggacggagcaatcgtctccggtaactgtgtatctgcatgtgataagaatcctacatatgtacatgagaataatccggttgttcatgatctgtttgaagaacatggaaagacactgaactttgtatgtcagatcattacaaatgaaaatgtataccttgcagataaagaaagatcttctgactggacagcaaaactgtgtaagatgttagatctggatggcgttatcgtatcacaggaaggatttggtaatccggatacagaccttattatgaactgtaagaagatcgaagcagaaggcatcaagactgtaattattacagatgagtatgccggacgtgatggaaaatcacagtctcttgcggacgcagatgtggcagcagatgcggttgtaacaggtggtaatgcaaatgaagttgttatcctgccaaagcttgataaagtaattggaactttggattatgtgacaaagattgccggagcaagtgaagatacacttcgcgaagatggatctcttgaagtagaacttcaggtcatcacaggtgcaacaaatgagacaggtttcaataaactgagtgcaagatagaagagggaggataagaatatgtctaagataaaagtagttcattatatcaaccagttctttgcacagattggtggagaggaaaaagcagactatcctgcagaaattcgtgttggggaagttgtaggacctggtctggcactgacacagaattttaaagatgaagcagagattattgcaacagttatttgcggagattcttacttcaatgagaaccttgaaaaagcaaaagcagatattcttgcaatggtaaaagagcaggcaccggatgtatttattgcaggaccggcattcaatgcaggacgttatggtgtggcttgcggtacaattgcggcagctgttcaggaggaacttggaattcctgcagttacaggtatgtatgtagaaaaccctggagcagatatgttcaagaatgatgtctacatgatctcaacaaagaacagtgcggcaggtatgagggatgcagtgaagaaacttgctccgttggcagtgaaactggcaaaaggagaaaaaatcggttcatctgcagaagaaggatatatcccaaatggtgtacgtgtaaacttcttcgaaaaagaaagaggatccaaacgtgccgttaagatgctgatcaagaaattgaatgacaagccatatgtaacagaatatccgatgccgaattttgacagagtagaaccaaatccggcagtgaaggatcttgcacatgcgaagattgccctggttacttccggtggtatcgttccaaagggaaacccggaccacatagaaagttcaagtgcttctcactatggagagtatgatattacaggagttacagatcttacagaagagacatatgagactgcacatggcggatatgatccggtatatgcgaatgaagatccggaccgtgtacttccggtagatgttcttcgcgatatggaaaaagaaggtgtgatcggatcgcttcatcatctgttctatgcaaccgtaggaaacggaacatctgtagcatctgcgaaagcatttgcagcagaatattcacagaaattaaaagccgacggagtagatgcagtaatccttacctctacctgaggtacctgtactcgttgcggtgcaacgatggtaaaagaaatcgaaagagcaggaattcctgttgtacatatttgtacagtcactccgatttctatgacagttggtgcaaacagaatcgtaccggcagttgcaattccacatccacttggtaatccggcactggataaggaagaagaaaagaaattacgccgtcagatcgtagaaaaagcattgaaagctttgacaacagaagttgacggacagaccattttcgagtaatacatgtaaaaataaaggagatataacgtaaaatgagtgagatttatgacgttatcatccttggtgcaggtcctgctggtttggcagcgggactgtatgcagggagaagccggctgaatgttctgatcattgaaaaaggacaggatggcggacagattgcaatcacagatgatattgagaattatcctggacagatcgtagaaggggagtcaggaccttccctgatcgcaaggatgacgaagcaggccgaaaaattcggggccaaaagagtatcggatatgatcaaagaggtagaactggaaggcgatgtaaaaattctgaaaagtgaaaaaaatgaataccgtgctaagaatgtgatcattgctaccggtgcacatgcaagaccaattggatgcaagggagaaggacagttcagaggaaaaggtgtttcgtattgtgcaacatgtgatgcgaacttctttgaagattttgaagtatatgtagtcggcggaggagattccgcagtagaagaggcaatgtatttgacgaagttcgcaagaaaggttacgatcattcaccggagaaatgaactcagagctgcaaaatcaatccaggagaaagcatttaagaatccaaagttattctttatgtgggatacggtagttgagaaactggaaggtgaagatatccttcaggcaatgtatgtaaagaatgtaaagaccggtgaagtgacaaaagtagaagcagatccggaagatggaatgttcggtctgtttggatttatcggaacggtgccgaatacaaagatctttgaaggcgtcattgacatggatgaaagaggatacattaagaccgatgcagatatgcataccaatatcccaggtgtatacgcagccggcgatgtgcgtgtaaagagtctccgccaggtagtgactgcggcggcagatggtgcgattgctgcggtccaggttgaaagaagcatgtcagattatttctaaagagatgttcttttaggagaaactccggagtttaaccggattaagaatattatataaaaggaggaaaacagacatgatagatgtagataagactacttttgaagaagaagtattaaaagcagatggttatgtgtttgttgatttttatggagatggatgtgttccttgtcaggctttaatgccaaaggtacatgaatttgcagagacttatggggataagttaaaattcacatctttaaatacaacaaaagcgcgccgtcttgcaatttcacagaaagttttaggacttcctgtaatggcaatctataaggatggcgaaaaggtagaagagctggtcaaagacgactgtacagctgaatcaattgaagcaatgattaagaaatatatctagacagaacggtaatttctaaatcatagagaaatgacctgtaaaaggttaaaaataaaaagaaaggagatataattatggctattttagaagggaaaaaagcaataattatcggagatcgtgatggaattccgggaccagccattgcagaatgtgtaaaaactgcaggtgctgagatcgtattctcatctacggaatgtttcgtctgaacgagcgcaggcgcaatggatctggaaaaccagaagagagtaaaagaattcgctgaagaatatggtgcagagaacttagtagtagttcttggtgcagcagaaggagaggctgcaggtcttgcagctgagactgtaactttaggcgatcctactttcgcaggtccattgacaggggtccagcttggactcacggtatatcacgtatgcgaaccagagatgaaagcagagtttgacgaagcggtttatgatgagcaggtaggcatgatggaaatggtattagatgttgatgatatcgtttcagagatgcaggctatcagagatcagttatagtccgaagtttctcatacgaataaaaaggacaggtccgttgtgttcctacaggggactgtccttttttcaaaattacaatgcatttgtaagaagctgcaggtggcaggttctgtagatacggtgcttattttgaagtaaacagaaaggtggataaccaatgaacagtgtaattaaaggggcaagttatgtattagtacatacaccagatatggttttatataacggaacaacgcagacaacagagagagttgtaaatccggattccgaatatctaaaagcagtgccggaacacctccggtcatatgaagaggcggtttcttattggccgaatcagacttatatcggtaatgcacatccggatgaacttgctgcagttgaatttccatattacgataagaaaaaagaaggagcaaaacgttacggaaaatatggtgagatcatgccggaggaagaattcctgcttctggtacaggcatgcgatatgtttgaagtagtgagactggataaagcatttgtagcaaaatataaagatgtatttgcccaagatccaattatctctgatgacattattgaaaaaatccatgaaggtgtagagctttcagagatcgaagcattgatcaatgaagatcatgcagaaccattatattttgaacatcagttagtcggatgtgtaaaaccggcacatgatattgatgtgaatttatcttctcatattatgcatgagaatcttatgagcaaagcatccagcgtacttgcccttctgtatgctgtgaaaaatgcaggaattgaaaaatcggatgttgaatatgtaatcgactgtgcggaagaagcatgtggagatatgaaccagcgaggcggcggtaactttgcgaaggcagcggcagaagttgcaggtcttgtaaatgctaccggatccgatgcgagagggttctgtgcggcacctacacatgcgctgatcgaggcagcagcactggttaaatccggtgcatataagacggttgttgtcacagcaggaggatgtacggccaaacttggcatgaatggaaaagatcatgtaaagaaaggacttccgattctggaggactgtctggggggatttgcggtagttgtatctgaaaatgacggagtaaatccggagattgaccttgatatgcttggacggcacagcgtaggaaccggatctgcaccacagaatgtaattggaagtctggtagcagatccactggatcgggtcggtatgaagattacggatatcgataaattttcaccggagatgcagaatccggatattacgaaaccggcgggtgcaggagacgttccgcttgcaaactataagatgatcggagctctggcagttaagagaggcgagctggaaagaaaagaactcgtgaactttacaaaagaacatggtctgacaggatgggcaccgacacagggacatattccttccggagtgccttatatcggatttgcacgggaagatattttaagcggtaagatcaagaatgccatgatcattggaaaaggaagtctgttccttggacgtatgacgaacctttttgacggcgtatcatttgtaatccacggtaatacggcagcagaggaaaaagcggcttccggtgtatctgaggaagaagtaaagggactgatcgcaaaagcgatgaaagaatttgcagcaaccctgatggcagaataaagggggtgcgtgaaatggcagacaagattgaaagaatcattgcagatacattcttacagatggcagaaggactagagacaggaaacttcggaaagaagccaaagattgcattgacaggtatgggcagtgagcacggagaagaaaatgcaatggaagctgcgaagatggccgccaaagatggaattgaggtatattacatcggaacactggaagcagaaggcgttactactgttaaggtggcaaatgatgaagaaggtcataagaagatggaagaactgctggcatctcagaaaatagatggagcagtaactatgcatttcccatttccgatcggtgtgtcaacggttggacgtgtagtgacacccgcaaaaggaaaagagatgtttattgccaatacgaccggaacatccagtgcagaccgtattgagggaatgattaagaatacgatctatggaatgattacggcgaaggcgtgtggtctggaacatccgacagtaggaatcctgaatgtcgacggtgcacgtcagacagagattgcattaaaagaacttaagaagaatggatatgatattacgtttgcagaatctgcaagagcagatggcggatgtgtcatgcgtggaaatgatgtattgcaggggacaccggatattatggtatgtgattccctgacgggaaatattatggttaagatgctgtcttcctatacaaccggaggaagttttgaagcatccggttacggctatggtcctggaatcggggaagattatgaacagttggttatgatcgtgtccagggcatccggtgcaccggtgatcgcaggagcaatccggtatgcggcacagctggtaagaagtaaggtgtttgatattgcaaagaaagaatttgagatggcggagaaagccggactaaaggagattctggaagtaagaaaacagagctctaagccggcggcatcagatgagaatataaaagagccgccaaaggaagttgtaacatcccagatcgcaggaattgaggtcatggacctggaagatgcagtaaaagtattgtggaaacagaacatatacgcggaaagtggaatgggttgtaccggaccgattatccgtgtgtccgatgcgaatctttcaaaagcagaagaagagcttaagaaggccggatatatgaattagaaaataacaaatatgaaaagcctgggtgagaagaaattataaaagaaattcttctcattcaggctttttgcattgttatgattcgttatttctgattatgaagtctcttctcacggatatcggcgattgctgtataaagtacatcagaagaagagttaagaccagtctcacaggaatcctggataactccgatgatgaaaccaacaccgactgcctgcatggcaacgtcattcggcactccaaaaaggctgcaggccataggaatcagaagtaaggatcctccggcaactccggaagcacctgctgcacttaaagcggccagtacacagagaatgatcgatgtaaggaaatctacatggattcccagtgtatgtgcggtagataatgccataacggagattgtaatagcagcaccagccatgttgatcgttgctccgagaggaatggagatagaatatgtatcctcatccagtccaagttttttacagagttccatgttcacaggaatgttggcagcagaacttctggtgaagaatgctgtgatgaaacttccttttaagcaggtaaataccaacgggaaaggattctgttttgtgaaaataaacacaatgatcggattaatgatgaagatgacaacagccatacttccgaccagaaccaggattagttttccgtaagaaagtaatgcatccagtccctgctcagagattgtagaaaagatcagtcccatgataccgaatggagcacagcttatgatccactgaactgcagtagcggtagcatctgagatgttctctaatgcatctttcgttccctgatttgcatgttttaatgtgattccgaaaataactgcccagaaaagaataccgatgtaattagcattgacaagggaatcaaccggattcttaaccagatttgttaaaaggttggtcagcacttctgcaattccgctcggtggagtgatatccgtagaagaagctgaatctgtaaaggtcagtgttaccgggaataaccggcaggcgataactgcaacaaatgcagagacaaggttaccgaccatatacaaaacgataataaattttaagttggtcttctgaccagtcttcatgtggcagagcgcgctcataaccagaaagaataccagaagcggagcaatgcctttaagggctccgacgaacatggttccaaggattgagattacggatgcctgaggaacaacaagaccaagaatcaggccgatgatcagtccacagatgatacgcttgatcaggctgatgttgttccactttttaattaagtttttcatgcgtcttttggcaggatgaaaatcctgcacccctctctttcgtattttgctttcgtaagcatagtttgattatacaggaagactttaagaaagtaaataaatactttggaaaagcaaccataaaaatagtgcaaaataacaagaaaaataagaaaagaatgtgaaatatttgtcaaaataaacaaaaaatatgcgattgaaggttgtctataagagtcaagagtgttataataaccattgttagtatgaatgccatctggggagatggtgtgttttgggaggttataatatgcaattgaataatgatggtctgatgtgggcactggtaaaagaaaaaccggaagaaggtctctggatgaagagagttccgattccggaagtgggatcgaatgatgtgaaaatcaagattcataagacagcaatctgtggaacggatgtacacatttatcagtggaatgactgggcgcagcataccattccgatcggccttactgcaggccatgagtacgttggagagattgtagaaaaaggggaaggcgtacggggatttgagattggagatctggtatcgggagaaggacatatcacatgtggaaaatgtagaaactgtctggaaggccacaaagagaactgtaaggatgcaaaaggggtcggtgttaaccgtaacggagcatttgccgagtatctggtaattccgtcaagtaatgtatggccatgtaatccgaacataccggaagagatgtatgcaatctttgatccattcggaaatgcaacacataccgcactttcttttgattcactgggagaagatgtgctggtcgcaggagcaggcccgatcggatgcatggcggcagcaatcgtgaaatttgcaggagccagaaatgttgtggtgacagatatgaatccgtacagactggaacttgccgcgaagctgggagctacaagaacggttaacttaaaagaagaaaatttgaaagatgtcatgaagcagatcggaatgacagaaggatttgatgtcggacttgagatgtccggttcacaggcggcattagatgacatgatccacaatatgaaacacggtggacatatcgcattgcttggtttgcagagaacagatgcgaaagtagatcttgagacagtgatctttaatggattacatctgaaaggaatctacggacgtaaggtatgggatacctggtataagatgtctacgatgttgcaggcaggactggatatttctgatatcatcacacaccattttgatatcaaggattatcagaaaggatttgaagcaatgatttccggtaattcaggaaaagttatcctggactgggcacatgtgaatgactaaatagaaattgagaggtaagaaaatggcacgtaagaatgatattttaaacatttatacaaaagaagtagaaggaatcaaagaggcggggcttttcaaaggggaagcaccattcgtatctcctcagggagcaagagtgaagatggaagatggaagagagctcctttgcatgtgtgcgaataactacctgggactgggggataacccaagactgatcgaggcagctaagaggacatatgatgaaaaaggatacggagttgcgtctgtacgtttcatctgtggtacacaggatattcataagaaactggagaagaagatatcaggattcttgggaacagatgataccatcctttattcttcctgctttgatgccaatggcggtttgtttgagacaatcctgacagcggaagatgcagttatcagcgacgagctgaaccatgcttctattattgacggagtccgcctgtgtaaggcaaaacgtttccgttataagaataacgatatggaagatctggaggcaaaattaaaagaagcggatgaggcaggagcaagaatcaagctgatcgctacagacggtgtattctccatggatggaatcatctgtaacttaaagggtgtatgtgatcttgctgataaatataatgcactggtaatggtggatgacagccacgcagtcggatttgtaggaaagaccggacgtggaaccgcagaatactgtggcgtagaaggccgtgtagatatcattaccggaacattaggaaaagcactcggaggagcatccggcggatatacatccggacgtaaggaaattatcgatcttctgagacaaagaagccgtccgtacctgttctcgaattccctggcaccggcaatcgcgggagcgagccttgagctgtttgatatgctggaggaaagcacagaacttcgtgatcacctggaagaagtgactgcatattatagaaagaaactggtagataacggtttcgatatcatccctggaacacatccatgtgtaccggttatgctttatgatgaaaagacagcagcagaatttgcaaaacgtatgatggaaaaaggggtatatgttgttgcattctcttatccggttgtaccaaagggaaaagcaagaatccgtacacaggtatgcgcaagccatacaaaagaagatattgatttcatcgtaaaatgctttatcgaagtaagagaagagatgggattgaataaataatttaaaatgaaataaaaacaggaaaatggtatgcaacatttatgaaaagtggtgcgtaccattttcgtttttgtgctatactaaacacagcgtggatttgaaaggagagacaaacaacatggaaagaagaaatgcatggaagatatacacagctgatcagttaaaagaactggatcagatcaacagcagatataaagtatgcctggatgaaggaaagacagaaagagaatgcgtccgcctgacggtaaaagagattgagaagaagggttaccgcgatctgaaagatatcaaaggcagcttaaaagcgggagataaggtctatgcagtatgtatgggaaaaagtattgcaatgttccagatcggaaaagaaccactggaaaatggtatgaatattctcggagcacacattgattcaccaagaattgatgtaaaacagaatccgttatatgaaaatgaagatcttgcttatctggatacccactattatggcggaatcaagaaatatcagtgggtgacacttccactggcacttcatggagtgatcgttaagacagacgggactgtccagaaagtaaatatcggagaaaaagaggatgatccggtattcgtagttacagatctgctgattcacctggcaggaaaacagatggagaagaaagcaagcgcggtaatcgaaggtgagaaactggatcttctgatcggaagccgtccgcttgagaaagaagaaggactggatgaggatgaaaaagacgcagtaaaagcgaacgttatgaagatcctgacagactattataatatggaagaagaagatttcctgtctgcagaactggagatcgttccggccggaaaggcaagagactgcgggcttgacagaagtatgatccttgcttatggacaggatgacagagtatgtgcatttacttcgttatttgcaatgctggatgtagaagatgtagaacgtacttcctgctgtatcctggtagataaagaagagatcggaagcgtgggagcaaccggtatgcattcccgtttctttgaaaatgtggtagcagagcttgttgcactgacagaaggagaatcagatcttaaggtacgccgtgcacttcagaattcaaagatgctttcctctgatgtaagtgcagcttacgatccgatgtatgcagaagcatttgaaaagagaagtgccgcattcttcggaagagggctggtattcaataaatttaccggagcaagaggcaagagcggctcgaatgatgctaatgcagaatatctggcagaagtacgccgtgcaatgaatgcagaagatgtatcctatcagttcgcggaacttggaaaagtagacctcggcggaggcggaacaattgcatatatcatggcaaattatggtatggaagtcatcgacagcggagttgcagtgctgagtatgcatgcaccatgggaagttacaagtaaggcagatgtatacgaggcatacagaggatataagtcgtttttacgtaatatttagaaaattaagtcgcatattagtacttgaatgtactaaaatttagacaattgtgcagaatgcccgaaattccagggaaaaatcggcagatttattggtgaaagtcttgacgaaaactggtaaaaacagtaaaatatgaagtgcgacttagaaaatttagttttaggaggtcatgacaaatggcaaaatgggtttatatgtttacagaaggtaacgcaaccatgagaaaccttcttggtggaaaaggtgcaaaccttgctgaaatgacaaacttaggtcttccagtaccacagggctttactgtaacaacagaagcatgtacacagtactacgaagacggcagacagatcaatgacgaaattatgggtcagatcatggaagccatcgataaaatggaaggaattacaggaaagaaattcggagataagaagaatccacttctcgtttcagttcgttctggagcaagagcttctatgcctggtatgatggatacaatcctgaaccttggattaaatgaagaagtagttgagacacttgctgaagcttcaggtaatcctcgttgggcttgggactgctacagaagattcatccagatgttctctgacgtagttatggaagttggaaagaaatatttcgaagagctgatcgacaagatgaaagctgacagaggtgttaagcaggacgttgaacttactgcagaagacctgaaagagctggctaaccagttcaaggctgaatacaaagagaagattggttctgatttcccatctgatccgaaggaacagttaatggaagcaataaaagctgtattccgttcatgggacaacccaagagctaacgtatatcgtcgtgacaatgatatcccatattcatggggaacagctgttaacgtacagatgatggcatttggtaacatgggagatgactgtggtacaggtgttgcgtttactcgtgacccagctacaggagagaacggtctgttcggagaattccttacaaatgcacagggagaagacgtagttgccggcgttcgtacaccaatgcacatttcagaaatggaagagaaattcccagaagcattcgtacagttcaaacaggtttgtgaaactcttgaaaaacactatagagatatgcaggacatggagtttactgtagagcatggtaaactgtacatgttacagacacgtaatggtaagagaacagcaaaagctgctctgaagatcgcttgtgatcttgttgatgaaggaatgagaacagaggaagaggctgttgcaatgatcgaccctcgtaaccttgactctctgcttcacccacagttcgatgctgcagcactgaaagctgctacaccacttgctaaagcacttggagcatctccaggagctgcttgcggtaagatcgtattcacagctgatgacgctgttgaatgggctgcaagaggagaaaaagttgttcttgtacgtcttgagacatcaccagaagatatcacaggtatgaagtctgcacagggtatcctgacagttcgtggtggtatgacatctcacgcagccgtagttgctcgtggtatgggtacatgctgtgtatctggttgcggtgacatcgcaatggacgaagctaataagaaatttacacttgccggaaaagaatatcatgaaggagactgcatctcacttgatggttctacaggtaatatctatgatggtatcatcccaacagttgatgcaacaatcgctggtgaattcggaagaattatgggatgggctgacaaatacagaacaatgaaagttcgtacaaacgctgatacaccacacgatgctgtaaaagcacgcgaacttggtgcagaaggtatcggactttgccgtacagagcatatgttcttcgaaggaaacagaatcgatgcattccgtgaaatgatctgctctgagacagaagaagaaagagaagcagcacttgctaagattcttccagaacagcagggagacttcgaaaaactgtatgaagcactggaaggtaacccggttactatccgtttccttgatccaccgcttcatgagttcgttcctacagaagaagaagacattaagaaacttgctgacgctcagggtaaaactgttgagcagatcaagacaatcatcgacagccttcatgagttcaacccaatgatgggacaccgtggatgccgtcttgcagtaacatatccagagattgctaagatgcagacaagcgctgttatccgtgcagcaatcaatgtaaagaaagctcacccagactggaacgtaaaaccagagatcatgatcccacttgttggagacatcaaagagcttaaatatgttaagaaatttgtagtagagacagcagacgctgagattgcagcagcaaacagcgatcttgagtacgaagttggaacaatgatcgagatcccaagagcagctcttacagctgatcagatcgcttcagaagctgacttcttctgcttcggtacaaacgacttaacacagatgacatacggattctctcgtgacgatgctggtaagttcttagaagcttactatgatgctaagatcttcgagaacgatccatttgctaagcttgaccagacaggtgttggtaaattaatggaaatggctatcgaattaggtaagccagttaacccaagccttcacgttggtatctgcggagagcacggtggagatccatcttcagttgaattctgcaacaagatcggtcttgactatgtatcttgctcaccattccgtgtaccaatcgctcgtcttgcagcagcacaggcagcaattaaccagaaatagtacactgtaggtgactaacatagaacgttaattagcttatatagaaaaccccttacatcaattatggtgtgaggggttttttacgtgaaaaatgtacaaaagttcttagatatgataatatgatgataaagataaataggaatttgtgtgtggaggtgatggttgtgaagaaaaaagtaacaatagcgtttgtcatcattggtattcttgctataagtacaatgattatattttcaacatataagtcttcggaagcctatcgaaaagcaaaagcaaagacacagtgggagtgttctgtggtctgtgcggaaaagtcaacgcctgattcctatgtaattacatattctgacgcaaaaattttgtctaatacaggcgtgttgacattccagaacagaaacgattttgacattactgtacatctgctctgtgaaggaaaacaggaacttgtatctgacagtattcctgctggcggttgctattcttttcagaatgttacagataaagaatacacggtaggtattcatgctgaggttgatgaaaatacggatataaaagcatttgtatatgatggaaaagacactgaaccatatacaagataaatggtttctaattgcaagataacttccagttttcggaggtcgaagtatgggattgcttgataggttaaaatcgaataaaaacaacaaagatttctttgaatagttagatttacttttaaagaatgaattgagtagtgaaataaaagcgattatctttaatttatatgaagatacagataataaatggtttattgaattagttggcacattttcattcaataaggataatgacgattgggcttaaccagaaatagtacactgtaggtgactaacatagaacgttaattagcttatatagaaaaccccttacatcaattatggtgtgaggggttttttacgtgaaaaatgtacaaaagttcttgggtgtgctagtatgatgataaagacaaatcggtatttgacagagcgaaaggagctggataatatgttcattattatttatgatttttcaatggcagtactcatgtttctatttggaatatatttttacaaatcaaaaggaaaagctgcccgatttttgtctggttataatatgaagtcagaagaagaacgaaaaaaatatgatgaaaacgctatgtgtaaggcatatggaaaaagaatgatggttatgtctttgccgttcattgtaggaataatcatagatattcaatatcaaggaaccggttgcttgattgcatggatgatatggcttattatgtttatttcattgcttattgacagacataaaagagaacgataaattcaagtttgccgaaatatatttctaactttccctattttacaggctttccagcctgtgcattagcgaaacgatatgtattttcccttatttttgccctcatgagataatcgtaagggaaataagggaaagttttatttagtcattgcctgccactttatcaagtaaccttgcagattcccgcttggcttttcttgtagagtgtgcatagacattcatggtggtactgacatctgagtgccctaacagttcctgcacatcctttggttctgctccatttgccagaaggttgcttgtgtaggtgtgtcgcaactggtgaaaatgaaatccttcaaatccatccagtttctgagcaatcttcctgcaaacaattcctaacgagcttggcagttccaaacttccatccggtcttaagcagacaaaggatatttccttataatcttctggaacattctttgttccgtccagatgatagaactcatagtaaactctgtttttgtcttttacttctctgtagtagtttttgtggtaaagttctccgtactgcattcggtttttaagttgttcctttcgggcagtgcgaagaatctctgccagtgtatctccaaaatcaacaatccttaccttttttcgtttggttggtccgatgatattcttgtgccttgaaccatcatatcggatactgcgtctgattgtaaggcactgttcttcaagattcacatcatgccatgccagaccacaggcttcatcgatacgaagtcctgcataataagctatctggattggaagtattgccggtggattgtaattctgtagaaattcaatcagtctttcataatccttttgtggaattggctgtatatcgccatccatgtcatcatcagaaaacaggtcaacctcatccgtctgatatggaagtatattggagaatatgtatgacacataaaaaactgatatgtaatttacgttagcattttgagttgcctaaattcgaaagttaggaaaatcttaataatttctcaggcaatccattgtgaatttagatgttgtatttgctatacttaattggatatatgagcaaaggagttgaaaatatgtctgaaaagatattgattatagatgacgagcaagatatagcggatctgttggaggtctacttgaaaaacgaaaattacgtcgtttataaattttactgcgcaacggatgccatgtcgtgtattgaaagcggcgacattgatcttgccattctggatattatgctcccggatatgaacggcttttcactttgccaacttatccgaaagaaatacacttatccaatcataatgctaacggctaaaattgaggaaacggataaaataacggggctgacattgggagcggacgattatgtgacaaaaccctttcgcccacttgaagtagttgccagagtgaaagcgcagttaagacgttacaagaaatattcacccggtatcatcacagagaaaattccatcggaactttcctataacaaattgtgcttgaatgtgcagacccatgaatgtctgttagacggggaacctgtttctctaaccccgacagaattttctattctccacgtccttttgtcaagtgctggaaatgttgtaagcattgaggaactgtttcatgcggtttggaaagatgaatactactctaaaaacagcagcacaattactgtgcatatccggcatctgcgcgagaaactgaacgatacttccgatactccgcagtatattaaaacgatttggggtgtcggctacaaaatttaagcgaaaggagaacgctatgaagagaaaatcaaattgtttggcaactattttattcttaatttatctggcacttctggtttggatcatactgttcaaactacagttttcaatcagtgatctggataaagtaaggagtataaaccttattccttttcactatgacaaagaagttggcgcagcatttcacttaacagaggtactcgaaaatttcttgatttttgttcctatgggcatttatcttcaaatgcttctgccaagaacaaaattatatgtgaagttcatgctgattgctggaacaagttttttattggaaactatgcagtatatcttagcagtcggacgttctgatattactgatgtacttacaaatacggcaggtggtcttttggggcttgctgtatattcgatggcagcccggttaatcggaaatagaataaaagcaaacagactgttttccattctggcaggcatagtaagtgttgtcgtgattggtctgcttggctttcttctgtttgctaatcggtaggaggtgtattctcatgtcgaataaagaaatgacaacagaaaagcgccttaaagtgcgcttatacctatcattgctggtttataccgttgttggatatggtttgacccttatcttggactacatcttttcaaaatttgacaacggtatttttgcatggctctactggcggcttgatctgctttttattttgtatctgatgctcggctttatatgtatcttcaattactattggaaaaagccgtggggctatctggatgaagtaattgacgcaacccaaacggtctatgagcagaacaatcatacagtatcgttgtctgagccactgaaagaactggaggaacagctcaatcagattaaaatgtctgttctgttgagcaagcaggctgcaaagcaggcagaagaaaagaaaaatgaaattattatgtatctggcacatgatatacgcacccctctcacaacagtaatcggctatttgagcctgctccatgaagcccctgacatgcctgaacagcaaaaggaaaagtatgtaaaagtggcgttgaataaggcagagcgccttgaaaagctcatcaatgaactttttgaaattaccaagtacaatgcacatacggttattatcaaaaaagaaattgtggatttacattgtctgattgcgcaggtaatagatgaaatatatccgacactctccgcaaatggcaatacagcggtatttactgcggaggataacttatccgtgaacgctgaccctgaaaaactggcgagagttttcagtaaccttttacgaaatgcagcgtcatatagctacccgcagacagagatcactatatccgccaaacgtttagagcatgatatacagatcacttttgaaaatcgtggaaaaacaattccacaggaacagcttaacagtatatttgaaaaattcaatcgcttggatgatgctcggctttctaatacaggtggtgcggggcttggcctttctattgcggaagaaattatacatttacatggtggaaagattactgcatccagtcaaaatgaaaccatagactttgtgattacattacccctttccgcttaggaaaataagaatatgatcttaggaattacttaggaatttaagcgtgtgatttttgagattgaaaagcctttgttcggtacaatgatatcgaacaagggctttttattgttcagctgaagcaaaagaaaggagtgtaagcatggaactgaaaatagagcatttaagcaagcagttcaaagacaaaacagcagtaaatgatgtcaatctgacgttgactcccggcgtttggggacttttgggggcgaatggtgcagggaaaaccacgctcatgcgcatgattgctgatattatgacaccaaccaacggagcggtttactatgacggaaaagacattcgagagttaggtgaagtctaccgaagcaagtttggctttctgacgcaggattttgggtatcaccgggattttacggtcaaagattatttggagtatatggctgcgctgaaagatattcctacaagggcaaccacgcaaaagatcaatcatttgttggacattctttcgctctccgatgtgaaaaagaaaaaaatctccaatctgtcaggcggcatgaagcgtcgtgttggtattgcgcaggctatgttgaacgacccggagatacttgtcatggacgaaccgacagcaggacttgatcccggagagcgcgtgcgtctgcggaatttcatttccgagttttcgcatgatcgaatcgtgttgatttccacccatatcgtatctgacatagaatatatttctacgcgcaacgcaattatgaaagccggagaaattgttgatgtcggaactaccgcagaacttgtcaagcggattgagggcaaggtttggaattgcataattccgacctcaaagctgccggaatgtgaaatgcggctgcgcattatcaatcagcgaggcgaagatcacaatcaggtttctattcgttatctgtccgaacattcggaaattgatgggtctgttacaacggagccacgattggaagatctgtatctgtggttgttcccgcagacagacttggaaaaggaggacagataatatgcggctctttagacttgaactaaaacgtattttgaagtcacggcgcaccctgattttactttcaatcgcacttttgctttccgtagccatggcatacctgcctatttcatttgagggtattaaccgtccaaacgaagatggcacggttacagaattagatggcttggcagctatcaagtacgaacaagatttatataaaacatccgctggtgaagtgaccccggataggatcaaatcggctttggaaacttatcaaagttgcgttcgagaatatgggccagtcgaggaagagggctttcctctggctgtatttgttgaaaaaatcgtcccgttccgtcacttgctgatgggtctgtccgaagcgtttgctgatccagtaacaggcattggtgctgatttaatggatattgacccgaatgacattgacggagcctattatgaaaagtgcgcagaacatttacaggatgtcatgcggaatgagcaaagagaaaacgaaaccgcacagcagaaagctcttgaaaaatattcagaacttgatacgccattttatcttcattctggaatttcaaaagatgcatttgattatattgagttttatattttgttccttgctattttgtgtgtggcaatcgcagcatctactttcgccggagaatatcaaacgggcgctgacagcatcctgcgaaccaccaaatacgggcataaacaattagcaattaccaaaattctggcggcatttacacttttcgttgttactttccttgtcgggatcacggtacacattctgattttagatgcagcgttcgggacggattgcttaaaaacatcgtttcagatgcgatactctatcattaatctgccaaacatcaatctggggcagttgcagataattctcgcagcagcgggcttactttctgtattagcaacggttagctgtacgttgttcctgtctgcaaaatgtaaagacacattgacagttttgctgatctctattgtagttcttctcatgccgctttttgcttatgtagcgatgggagcaacatggctctctaccatacttccatctgccggaattggtatgcagaataatttcctttctcagcttgcagatttcaattatctgaatatcggtggaatgagtttctggacaccgcatgttattttgatttcggcaggaattgaattatttgtgtttacattcttggcgattcattcctattgcagacatcaggtagcataaaagaagttcaaaatagaacgaataggttatctgcagcgcgacggcaaaagaaaaaaagccgtcgcagagtagacacattttcacgcgcctatgaaacggcggctttgattttcagagccgccgtttctttgcatttgcacaaacctatgatgaattttccggaaatattgtggttaatagcgatttaaactgttgtatttgtttaaaaattaaaaaatatctaatgagtcttccgcatctacccacatctgcaaatttccatcaagatataattttgcatattcaagaggttcatcaatggcgagtgcgtttaatgcacagtctgatcctggtgtggtttttaagttcttttcagcttcccaacagtcaatgcggagcatatagccaacagaggtgtaaacatcaatactgttgcgcttgggattgtattctgcaaatattgttctcatcgtatcaaatctccttatcgttaaatcaatcatttgttgcaaaaatcagaatcatttcaatcagttcacaatgtcactttcattttgtgttatactgttttatataattttcttggtctccgcttcgctacggtcggtgcaaagcggacatccactggatgtcctgcacccttgtatttgcccttatcagagttcgtaaacactggtgggacgatataacacaagggaaacaataagggaaagctcacctgcgataaatccagtgttttcaagggtttacagtgaatttaataacaaaatataacagttattaaatctcttaaaacaggtgaaatctcaatcgaaatttgtgaaggaggaatatactatgaatatagggttttggctatgtggagttttggttattccatttgtgattataggagtgttatttgcaatatttaaagaaaaagcggctaaatttgtttcgggatttaattcattaccgaaagaagaacaggcattgtatgataaagctcatatttctcgtgatataaaaaatcagtgttttacatgggctggcataatgttagtaggagcagtgttgtcttattttttaacaccatatatggctattccggcttttattatttggctcgttttatttttcaaagaggttcactttgacacgcacaaagcatttgaaaaatatttattaaaataacttccagatgataaagcagaagtatagggtttgattcatatgatttcagtaaaaaaacagagaattgctgctattatggttttaagttccatcatgctgattttacttttgtcgctaaatttccgaatctggagtggatattatgcagaaggggatttggaaagtatagtcatacagcagatggaatgcttggaaaagtcaaatagtgaaaacgatataagcgaaagtatatgtttgcatttctatgagtgtatatgtttcggtggaatagaaataatggtgctctgggtatatgatggctttaaagacctcggacaaggtgagttttctttcagaccgggagttaccctttgcagtctatcggttcggatggatgattaaataattctgataattaaatttaaaatttattatcaggaggaacttcgatgtatgtattaaatgcaaatcatatttcaaaaagttataaaactgcaggagaaactatgcggattttgcagaatgtgaatctgcaagttatgaaaggagaaatggttgctattatgggaccatccggcagtggaaagactactctgctccatgtgctgaccggggttgacacaccggacgatggagaaatcgtaataggaggagaaacgttttcacagcttacggaagaagagaaggcattttttcgcagaaagcatatgggaatgatttttcaggatttccagcttttggagagtttgacggtaaaagaaaatatattgttaccactcattcttgaacgaaaagaagcagacatccagcaagagcgtttttcaagaatagcggatgtgctcggcattgaaaaattagctgacaaaggaattacggaaatatcgggaggtcagaaacagagagttgcgattggcagggcgctgatcaatgaaccggatattatttttggagatgagccaacaggaagccttgaccgaaagaccaccggggatgtgatgcgatgtatgaaacagatgaatcaacggtctggcatcagctttctgcttgtgacacatgatgcttatacggcatccttttgtgaccgggtactttttctacaggatgggaatctggcaaaagaagtaaagaaagagaacactgccgataatttcagagaagatatatggaaaacgctgtgcggtttgggaggtggaaaagatgaccttttttgatatttccagaaagatgctgaaagctggtttttacaaatatcgattgtactttctatgcaatttatcggcaacggcattattctgttgttttgcagttatttccacaaacaggacgtttatgaatgcgtcgattgtaaattcatcaatatccaataacatttatcttccattttttctgtctgcagtgtttctggttttttttcttcctgtttcgtgtcaggcatttctggcatcaagaaaacaggaatacggcgtgatgttttctcttggcatgagccggaaggaagcgtttagaaacttgctttttgaaaatgtgatcatatccgtgctggcattagcaatagcacttgcggcaggaactgtgctgtcatttttatttttttccgttatcatttatgcaatagatgttcacggagtgcaatggcagttttgcccggaagcatataagcttacagcagttctatatacagtagtggtggcagttgcctttatcctgaatgccgggagacttatgctggataaaatcggaaccctgctaaaagcacaatatcgggcagaaaaaacaggaaagatcggtacgttcttatgcagacttgcacccaactacatgaggtttcatctggtggaatggtcatttgtccgcagacacaagaaagaatggggatgtaggtatgttttagcctctctcataatagcggtatctgttatgcttacgggggtatgtgtgacgttatatccggcttttctacaggatgcaaaaagttattctccctatgacatggtgtactcagaaatctatggaatgaatcaggtttcagtacaggatgtccttcatatattggagaaaaatggtgttactgtagaactggtcattcagcttccctatatcagagatgatgtttttaattaccttcctgtgacagaaataaaccgggattttggatgtgattatcagattcaggaaggcgagtttttgaatttgtttcagtacaatctggaagatgggtatgaacataacatacagccagtatctactgtaacgatttccggggacagaaagctgcagtctgttggaacagatgtaaagatactgtttaatcaaaatccgacctttgcagataaaacactgatcatcaacgattctgatttcgaaaaattaagtgcagatataacaggtagtgttggtatcgcaaacttgtttcagtttcagaattgggaagattcttatgcgggagtatgtgaagtaaaagaatatctgcaggaaagcaatcagttgaatgaagatgagcagacatattatgaattgtcttcgaaagtggagaaataccaggatgcaaagaaatcaggacaatttttattatttttgatggcatttgtgatagggcttatgataatggctgagtttctgttaattcattcacgtatccaggcagagaaggaagaaaatagcagggtcgtttgtagtttgcgaatgttgggaatgatagacaaggaaatggtaaagtgcctatgctataagaattttctaagatttataccgccatcggttgtgggaacaatcctttctttcctgccatcttattatctgaatgagagttatggaatggggacgaatggaattctggcaggaatcgtatttggagtgattttgacagtcggaatattcgtagtgatacgcaggtattctgaaaaagaagaaaagctttatgaaagcggttttataatacaaggaagaggatttttcgagaggattttttgattatagataagtagaaaaagattcaaatcctgtgtataattaaaagataaagatagagacaactcggaattttgctttcgatgaccagaatgaaaatcgttaccgttgcgcctgttttcacaagcgttgcgtgacataaaaagaattctattttaatatcaaagtatcaaaaacaaaggaggttctttttatgttgaaggaattaaagaaaaacaaaatgagtgttgttgcaactggaattttatttggtgttatgggggtattaattattcctatgatagcagtaattgtaaaaatatcgaatgcattatcccaaaaacatcctaggatatacaagtatagtatgattgcttttatcggtatgttattggcaattagcctattttgcgttgttattaaacatcagatgagttttcttgtaatagttgcttgtttagcaataacattatgcgacactattaaaaacagataataaatggagtacaactatggaaatatcagatttgattaaatcagccagaagtgaaaagggcttaacccaacaacaactggctgatgttgtctttgttacgcgacagacaatttcgaaatgggaattgggaaaaagtgttcctgaccaagcctctcttatattgctataccagtatttggacatcaaggataatgagaaaaaacagttatcaaagcttatttttaataagcaaaatattatattaattttgattgcaatcttattttctcctatggttattggagtacgttttatctgttgtaaaattgataagattgaaaatcgaaaaattaaagcggtaatcaaggttattggctttgttgtattctcatcgtatctagtatctttaaaagaaaatgtggcgtatttgttaattggtatattttctctggtgtatttgttatatcaattctatttgagtggattggaaactaaatgatttgtgtcagcaagtttaaggcaagcgataattcatgaaattccagtttatagaattaagaaaatgaaatgtaaggaggagtatgtaaatgaaattagcagatttagcaacaggctctgattggatagtgtggattgtctttgcgatatttgctgtactttctattattttactttctggacatggaagctggttcatttctggatataatacagcttcaagagaagaaaaggaaaaatatgatgaaaagaagttatgcagaacaatgggaattggaatgtctattatagcaattcttgcattaactatgagcttgtttgaaaatattttgcctgcattttttatatatattgcattggggattattttggttgatgtcgtggtaattatcattttaggaaacacactatgcagaaagtaataacttccagtatgtagagaataagtagtaataaaaatctgtaaccccttacgctcttgggtggcgtaaggggtttacagattttttttgatggaaagataagaaagtttatacaaaaattgaataattttttatggaaaatattattcgttcaaactacattccatacgtaattttgtggtttcgaaatttgaatttttatataatgactgtgcaatttcattattagataatacatataaagatattttggtataacctaattgcttagcagtatttttagcttcggataatagatgttttccgatgctcttttgtcgctaatatttgtctacatataaataaattaaacgacattcatgtttactgattcctttgataacaataaatcctctttttttctgataatataaaccaattaaaataaatccgtttatcttattaatcagattttttcaatacttatttgacagaggtttaaattgtttgggttcgtcatcattgttagtgattgatgagtaaaaaacttcgttggatttagataatttttcgtaattttcttttataaatttaagatcataagaagttgccgatggcaagttctctgtgtgaaaaaatgtacaaaagtttttgggtgtggtagtataatgataaagaaaaatcggtattgttttaatatgtcttggatgcggaaggcgaacaaaagctagtttctattctggatagttaataaagagaggtgcatatgctatgccaggtatactcgtggttgaagatgatgaaaatttaaatcgtggaattacattctcactgaaaaaatccggatatgaggttttttcagcagaatcagtgaaaaaagcgaaaagaattgcaagtgatcataatgtggatgttaccatttgtgatgtgaatcttccggatgggaatggactggaatttgtaaggtggatgagatgcaattataatacatacattatttgtcttacagcactagatcaggagatggatcaggttatgggatatgaagcaggggcagatgattatattacaaagccgtttagtctttcggtacttcttttgaaaatagaagcacatttccgccgcagacaggagaaaacggaagccggaaagatgatttcgggagatatcgtatttatcgcaggagaaatgaaagtcctgataaagagtcgtgaaatcagtctgacaaaaacggagttgaaaatgctgactttttttcttcagaatccaaaacagattctttcaaaaacacaaatattggaaaatgtgtttgatctggaaggggattttgtggatgaaaatacaatcgctgtcaatatcagaagactccgtgagaaaatcgaagacaatccggctgcaccggtctatataaagaatatcagaggtcttgggtatatatggaatcaggaggtaaggcagtgacaaagagatatcgcaagaagattgcagtagtgctctccttggtattacctgtcatattattgtttgcaatattaaattgctttaccacgtatgtgttttatgaagattataaatataaaatgaatcttatgacagagattgctgcaaaggaagaattttccgggctggatgctgtttcggaattgcttaaggataaggatattgaaactaacgaacagggaaggcgattattggagcaatatggatactggggaaataaagggaatgcattttatatgcaattccggcatcaggttatggtgaccggtgctgtaagcactgtgatatgcgtgcttcttttgacttttttactttattggaagaaaaaagaagatgcgtgtcatcagaaaattttagaccagttggaagaaattctgatcagattccgtgaaaataaatttgatgctttactgaaaacggaaaatccagcagaactggaaaaattgaatgaccagcttgaagcaatcggacatcatattcagttgctaaaggaagaagcacgggaagaaaaagagagcacgaaagaaatggtttctgatatctctcaccagttaaagacaccggttgcagctttggatacatgttttagtgtgctgatgcagaatgacttaagtgccacagaacaggaggagtttcgtatccgttgtcggagtgctctggatggactggagacattattgcagtcgcttcttgaaatatccaagatggaaactggactgattcagattaataagaaaaaacttccgcttatggatactgtcatatctgctgtgaactgtacttatccaaaagcggatgagaaagaaattgaattcgtttttgactatgcaaaagagctggaaacatgcatggttatgcaggataaaagatggcttggtgaagctgtgatcaacgttctggataatgcaatcaagtacagcccggatggttcaaaaatatttatccggttacaaaaaagaaacgatcttgtaagaatggaaattgaggatcagggaattggtattccgcagaatgagtatcacaaaatttttcaacgattttacagaggaagttctaggaaggtcatggaaaagagtggtacaggaatcggactttttctatcgagagaaattatcgaaaaacacggaggtacaatcatggtaacctccggcaaaaagaaaaaaggaagcacgtttgtgattcaattaccatatgttggttaaattttaagtgggcagaaatcttacaattctgtaagacttctgctcgttttttgaaagtgaaatgaaagattatcctgatacaatttggatgtagggtgaaaaggtacactttacagaattaaaaaggaggcaacacatgagtgtgatattagaaaccaagcagctttgtaagttttatggcgcgggtgagaatcaggtcaaagcggtcaatcaggtggacattcagattgagcagggagaatttgtcgcaattgtcggaaagtcaggttccggtaaaagtacattacttcatatgcttggagggctagacaccccgacaaaaggcagtgttactttagcagggaaagatttatacaggatgaaggaagatgcccttgctgttttccgcagaagaaaaatcggatttgtttttcaggcatttaatctggtttcatctgttaatgtctgggaaaatattgtactgccactggggctggatggaagaaaagtggatgaagcgtatgtaaatgatattattgcaactctggggattgaaaaccggatttataatctgccaaatcagttatcaggaggacagcagcaaagagtagcaattgcaagagcactggtgaatcgtccggaaattatatttgcagatgagccgacaggaaatcttgattctaagaccagtgatgaggtaatcgctctgcttaagatgacagcaaaaaaatatggacagacaattgtaatgattacccatgatgacgaaattgcacaggtcgctgaccgtattctggtgattgaggacggacaggtggtggatttcagatgaagacaataagcaggattgcatatagcaatgacaaaaggaacaggacaagaagtatactgatcatgatggcaatctgtctgaccacgatgctgcttgttatcatcagtactgtgggaaatggggtaattcatttacagaaaagtcaggcggcaggatcatatggaagcaattatggtctgtttgtttccgcagacggatcgcagttaaaagaagtaaaccgccgtgcggaaatagatgctacaggcactatgtgcaccgaaggtatcataaaaggcaatgaaaaaggcgggtttgtctgcatggatgagactgcaagaaaaatgcttccttataataaagaatatgagttgaaggaaggaaagtatccggaaaaaatgcaggaaattgccgcaggaagagcattttttcgtgcaatggggtatggtgatgtaaagatcggagatacggttacactggattaccgcgcagggatgcagtcagaatataagccggaagaatttgttgtcagcggaatcctatatgatcgggatgagtataccatcgaggcatcttatgttgctttcgggtcacaggagttttatgatgagcacgtcgcagagaatgacagacagtataatatttattttactttaaatgattctgcaaatgtatctatgaataatattgattcggttataaagcagattgcagcagcttgtgggatcgaagaaaaaaacgttatagtcaatgatctctatttacaatgggtcttgcagccgagttatgaaacgattgcggtatgcgggggtttgattcttgcaattgtacttttctctgttgtggtcatttataatatttttcaggtcggtattgccaacaagatacaggagtatggaaaaatcaaggctctgggagcgacaaaaaagcagatgaaacaactgatcttcggagagggcatttttttgacatttttttcaataccagttggattgctttttggctttctgattgcaaaatgcggttttaactggctggtagaacaggggaaccttgtatcaaccggaactggctctatgggagttcaaaatcagcaggtgcctctgttttccttgcctgttatgcttctctgtattttcgtatcatttcttaccgttgctttggcactgcgtaaaccaatgaaaattgtttcacggatttcacctatcgaagcaacacggtatttagaaaatgcagaaacacaaaaaaaaggaaaacgaaatggcagaaaaaatgtcaccgtgttttctatggcaatggcaaatataacgggtaatccaaaaagaaccattggtaccatcctcacactggggctttcctgcgcattgtttgtgattatctctaattatgtgggaaatattgacacggagcatgaagcacgtctttccgttaatcatggacaatttgaactgcagcttgactattcttctgagtatgatgaaagatatccggagaataatctggatacgattctgacggataatccattgaatgattcgctgattgaagaaatcaaaagcattccgggagtgacagatgtcatgacgagagagtgtgtctctgtaaatctgaacggaacaagatttccggctgctgttgtgagtaaaaaggattttgattttatgcgccaagatggggatattggttctatggactaaatatgaagtccttccaaaggatattcactggcatatgattgggcatatgcagcgtaataaagtaaaatacattatcgataaagttgatctgattcattctgtagattctgtccgactcgcagaaacaattgataaagaagcagaaaagcacggtgttattgccaatatattgattgaagtaaatgtcgcaaaagaagaaagtaaatttggtctcatgccggaagaggttcctgaatttgtagaaaagattgccggatttcctcatatccgcgtaaagggattaatgacaattgctccatttgtagaaaatccagaagaaaacagaccgatttttgcacatttaagaaaattatctgttgacatcgcaaagaaaaacattgataatattactatgagtattctttctatgggtatgacaaatgactatcaggtggccatagaagaaggagctaccatggtccgtgtgggaaccggaatttttggagcacgtgattatactcatcaagtataaacggaagataggagatttattaaaaatgggagtattagataagttcttaagtatcatgaagttagacgacggagatgatgaatacgatgaggatgaattcttcgacgatgacgaatatgatgatgattatgaagaaaagcccaagagaagcctctttcataaaaacaccaaagacaatgataaagatttcgatgaagacgatgaagacgattacacagcacctgtgaagtccaaatctgcattctctaataataaagtaactccgatgcgtcagccttcaagaagaagcagtgtaaatatggaggtttgcgtgatcaagccaacttctgtagaagattcaagagagattacagagactttattaagtggacgtaccgttattttgaatcttgagggactggatcttgagattgctcagcgtattattgattttacttcaggagctacatttgcaatcagtggtaacctgcagaaaatttctaattacatattcctggtaacacctacaaatgttgatatatctggagatcttcaggatttgcttaacacttctctggattcttcatctatgaggtcaagattttaattatgaataaagaagaaagtatgttacagaaacgtctggtggagctctccagactggcatataacagagggattgttatattttccgactttcttaatttgaatgaattaaatattcttcataccacaccaaaagacatgtttttatctcagtataaaacttatggtggatatgacttatcagagcgtcagatggctgtttttctacctgatgctctttattatgattatgaatatcccattcagattatagaagtcactccgtcaagcaaaagatttgccgaaaatcttacacacagggattatcttggagcacttatgaatcttggcatcgagcgctccaaagttggagatattattgttgaagatcagaaaggattgatttttgtcaaagaagaactcgctgaatatattgcagataatctgactgtggttcgtcatacgaacgtaaatacatccataggaaaaggggttaaagtagattatgaaccaagatttgaggagctgaaagggaccgtatcttccattcgtctggacagtgtacttgctcttgcctatccactttccagaagtaagattactgcacagattgaagccggaaaagtctttgtaaatggaaaacttatcacgagtaacggttatcgtttaaaagacaatgatattatctctgtaaggaaaatgggacgtattgcatatgatggtattctctcagaaacaaaaaagggacgctacctgatctctgtacgcaaatacatttaggacaataatttaaataatttatacagttaatttatagaaggagtatcatgaagacaaatacaaaacgaatcacacattatataatggcattggtaagtatcgttgtactggtattattggatcagattacaaaacatctggttgtattacatcttaaggatcggtctgcctatgtcctgattaaagatgtatttcaattagaatatctggaaaacaggggtgcagccttcggtgtgctgcaaaatcaacgtatattcttttatatcagtgtacttttgattacaattgctgttatctggttttaccacaaagtacctatagaacataaatatctgccgcttcgtatctgtgcagtgttaattctttccggtgctttcggcaattgtatagaccggatccgtctgaattatgtagtcgattttttatacttcaagctgatcaacttcccgatttttaacgttgccgatatctatgtaaccgttgcagcatttctgctggttatattaatactcatttactataaggaggacgaccttgaaagaattttccattgatcgcaatacagaaggccagcggatagaccgctatctttcagatgaattagaagacagatcaagatcttatatacagaaaattatgaaagaaggatatgtaaaagtcaaccagaagcctgtaaaatccaattacaggctttcttttggcgacagcgtggaagttacccttccggaggcaaaagagcctgatatcgtaccagagaacattcctttggatatcctttatgaagaccaggatatcatcatgatcaacaaaccaaaacaaatggtcgtacatccggctcccggacattatagcgggacactggtaaatgctttgatgtatcattgcggtgatgagctgtccggtattaacggctgtatgaggcctggaattgtccacaggattgatatggatacgacaggatcattagttgtatgtaagaacgataaagctcatcaaagcctttcggaacagttaaaagtacactctatacggcgtatctatgttgctatcgtacatggaaatatcaaagaagattccggtacggtcaatgctccgatcggacgccatccaacagaccgaaagaaaatgagcacccattgtaaaaacggacgggatgcagtcacacattataaagttctggagcgattcggcgattacacatatattcagtgcgaacttgaaaccgggcgtacacatcagattcgcgtccatatggcaagtatcggacatcctctggttggtgatgaggtctatggtccgaaaaaatgcccattcaaaggattacaagggcagaccctgcacgcacgcacacttggaatcattcatccaaccacaggaaaatatctggaagtaaatgcacctctcccagaatatttcattgaactattagacagactaaggaatatttataactgaattatgagaaaattctatacatttgtctaagtttgctgtataatatgtttatattaatttttgtttaggagcgtgatttatatggcaaagacaaatacaatcattacaatcggtcgtgaatatggtagtgccggacgccagatcggatataaagttgcggaagatcttggaatcaaattatacgacagagaaatgctggaacgcgcagcaaaagaaagtggtatctgtgaagaactttttgagacacatgatgagaaacctaccaacagttttctgtattctttggttatggattcttattctttcgggtatccttcatccagttacacagatatgccaattaatcataagatttttcttgcccagttcgatacaatccgtaagatagcgtctgagggaccatgtattctggttggacgttgtgctgattatgcattggaagaattcgataatgttttaagcgtattcattcatgccgatatggatgccagaatccgcagaattgcacgtatctatgatctgacagatgcaaaggcgaaagacttgatcaaaaaaacggacaagagacgttccagctattataattattacagcaataaaaaatggggagctgccgaaagctataatatctgccttgacagttcacttctgggaattgatggtactgcaaaggccattgagcagctggttgaattaaaagagaacattacagataaaaaattataatctaattaaactaataaataaaagaatctccgacatatattatttactatatgttgccggagattcttttttcatttaaattaaaaatagatgaacaagaagaacacacctgtcactgtgacaaaaaagttccattacattttatatttctcgtaatttgaccgcagaagcagctttacggcgtcggttatcatcaatcgctgcataatgcttttttgttgtgttaacatctttatgtcccaggacatccgctaccagataaatatccccagtctctttatagagagaagtaccatatgtactgcgcagtttatgcggcgtgatttttttgttcggtgttacctgcctggcatattttttcaccatattttcaacagcctggacacccatgcgttttctctgtgttgacaaaaacaatgcctgttcatggccggggaggggagtagcggcctcacggtcacctgccatataattcttaagcgcctccgcaacctcatcaccgaaatagacaaccatctgatttccaccttttcttgtaaccataattccattgttcttaaaatctacatcctttatatccagtccgacacattcggatacacggattccggttcctaataataatgtgagaatagcaatgtcacggtcacgcgttttcttataataattcagtgcctgcccggtcagatgttcgcctgcagattccacaaaatccaataacagcgcaacttcatcagtatccagacgtatgattgccttatcatgtaatttaggcatatctaccagaagtgtcggatttttctgaatgatccggtgcttgaagtaatatccataaaaacttctaagggcagacatttttcgtgccagacctttttccccattggtgatcagttcgccgtcctcatcacgtttgtatactttcagatattccaggtattcctcaagatctacaggctcaagattctcaagatcctgaggcgtaaatctgtcaattgtataattcttgtatacaggattgttttccataagaaagtggaaaaacacacggatatcgtaagcatagttaatacgggtacgtgccgatgatttcggttccatagcacggaaatagtccttaacaaaaggcggtaaagtcttcaaaacttcacggagccgtaacgtctggtcgatctggctctgttcatgataattatgcggtttgtttgacgatgtattggccagatttgtagatgaatcaatcatgtaggaaaaaacctccttaaaaaataataaatataaaaagcataagtgtatgatagtatgtatatatacatatttttacaaaacatattgtaaagaaaacatatcgtaaataccttacaaaacagtataattatagcagaatgagtccttttcgtccatatcttttggaaaaatcggtatttgtcgtatagatatgagctacttaaaaaaactattctctaccattttttcaaagttttatttatctcatccatcatatcagctatcattccataataataaaaatggcaatgaactactatttttcattcattgccgtgggtgagtatattatatataagccttttcagcatatatatcaaatttgtcctgttttgaagaataccaaactatttattataactataatatggaaccatcagatactgactgtcctgaatctgatcagaagaaagtttgttaatctttttcacttctgtaatataatcattaaccgactcataatcatctgacatattttcttcggcgatattccacaaggtgtctccacaatgaatctgaatgcttttataatatttatatctgattgaattatcctttgcattgtcatgtgcactcacaagaccacttccgtaaaacgcgctaaggcccagaatcatgataatagaaaagaaaccagcaaataacttcttcacatacaagcttctctttctccggatgcttactctgttataaccggaataattgtttcccgcataaatctttttatccgcattttcgtcagtttccttcaatccttccaagtatattcttcttgtgctcatcctgtacccctccatcatttcttcaaaacagttgtctgtgaacatgtgttccttgcactgtttattatatatctcgaacacatgtttgtcaatagattcaatgctatatttcgaacatattttctaaacatctgtttgcgttttcctatatactgtgttatcattaaatatataaaaattaacggaaagaaagcccacttaaggaggacatacatatggcacaaggtaagataagtgcaaagcaggaagaaatattggaatatataaaatcccagatactggagcgtggatttccaccatcggtcagagatatctgtgaggcagtacatctgaagtctacttcttctgtccactctcatctggaaactttagagaagaatggatacattcacagggatccaactaagcctcgtgcaatcgagattttggatgattcttttaattttaatcgcagagagatggtaaacgtacctgtgatcgggcatgttgctgcaggagaacctcttcttgctgaacagaatatagaaaactactttcctatcccgatggaatacatgccgaataagcagacttttatgcttaaggtacacggagaaagcatgatcaatgccggaatccttgacggtgacctcgtattagttgaacaatcttctgttgccgataacggtgatattgtagttgcattactcgatgacagcgctactgtcaaaagattttacaaagaagaaggcatcttccgcctccagccggaaaacgatgcactggaaccaattatcgtccgtgatcttcagatcatgggaaaagtaatcggagtcttccgtttcttcgcttaaacacaaacaattccaagcattcaagcgttcattcaatatttatttgttgttgcaaaatcaataacattcaaaagccccgtgcaatatataaaatataaaacagataacttcgaacgaagtgagcggaatcagttttatattttatatgcacgaggctttcataaaatcttttacaacaataaacttttattaaaattcatttacatcatcaattctctttccatcattccagatccgttccagattatagaactgacggttttctctatcaaaaatatgcacgatcacatcaccgaagtcaatcaatacccatgctccgcttctgtgtccttctgtctcttttgcagcgtagcctgctttgtgcatcttttcctctacattctcaacaagtgcacgtacctggctgtcgctgttaccatttgcaattacaaaatagtctgcaagtacagataccgctgaaatatcaatcgcacatacatcttcaccttttttatcctctaacgcttcaaaagcaatttttgccatttcttttgcctgatccatattaatcctcctttcccatttcttttttataataatcataagttctctgtgtcatagggtccactgtaatattcttactatccagatataccagtgaatcttttaaaatccggtaaagacattcatcaatgtccctaaaagcaagctgtcttacatctgccatattcggcagttctcttctacccggctcgatataatccgcaatgtagacgatcttctccaacatgctcatacccggacgtccggttgtatggctttcaatcgcacaaatgatttcttcatccttcacaccatatttttcatgagccagatacgcaccgagtctggcatgtaacagacttggattttccttttctacagatgacaccggaaggccgtatttctcgcacagacggattttcttatcgctagggatacattttgcacaatcatgcagtaatcccgcgtaaagtgccttctgtacgtctacatcgtaacgcatggccattgaagcagacgtgtacatcacaccaagtgtatgatgatagcggttttcatccagttctttctttaacgtatgctgtatttttaaaattttttcatccatcatcgttttcctcttttgctttttcacatgctttttcaaagctgttaccggtataactggtgttcatttatataaccgcacacagcatccggaacatatgccgagacagattcaccggcctgaagactggcacgcagttcatgagaggatactggcataagcggtgtctccataagcaggacctgcgccccatatttctcagacagatgatggatctgctgatccatctcttctttcgtctttatctcgtcacggtacgtcgcaaggatcgtacacgttgggaagatccgctccggatgtacccaggtctcaattgccataagcgaatctgcgccgataataaagtaaaattcatcctccggatacatttccttaaaatattccatcgtctgataagagcaggatacttcctctctcaatgcctcatacggctgcaacacaaactctgggaacggtgcaattgcaagactggtcatcttcatccggtcctcagcagtagattttattgtctcactctttttatgaggaggatttccatttggcataaaccagatctgatccagagaaaatgtctcatatgcagcatgtcccagcatcaaatgtccgttgtggatcggatcgaaggttcctcccataatccctatcttcattcaaatctcctacctgtatttattttggcagttcgatcttcttatgtttatctttgccttctttatataatacaatcttcttaccgattacctgaactacctgtgaacgtgtacgttctgcaatcacttctgcaagcgcacgcggatcatctgcacagttcttaagcacactgatcttaatcagttctcttgcgtccagtgcttcctggattgctttggtaacttccggtgtcatgctgttctttccaatctggaagatcggatctaaattcatggcaagaccttttaaataagctctttgttttgttgtcatctttaatctcctctttatcacaatcaacggaccgcaattgatcttttatttataataatcaaactgcaggccatacatacgtactgtatcaccctcctggataccagcttcttcaagttgttccagaataccagaatctttgaggaatttctggaagaatgcaaatcctctttcggaatccagattcgtataaccaagcattttttcaatctttggtccctctaccacatacatatcgtcttccttttcaactgtgtatggaagatcattcatcgggatctcttcctctgggaaatattcctgctcaaatacgatcgtatcctgttccagatgctgcaattcgttcgatacatagtaaagcaattccttgataccctgtccggttaccccggaaatcgggaatacctttactccctgtggctcaaattcatctttcagacgctgtaccggatcatcatcggtaaagattgcatcaatcttattcgctgcgatcacctgtggacggttcgcaatatccgcattatatgcttttaactcattgttgattttatagatatcatctaccggatcacgtccttcggttccggctgcatctactacatggatcatcagtttggtacgttcgatatggcgcaggaactgatgtccgagtccgacaccttccgatgcaccttcgatcagtcccggaatatcagcgattacgaatccgttcgcatccggaagatccacgacaccaaggtttggattcaatgttgtgaaatgataattggcgatcttcggctgtgcattcgtcacacgtgataagaatgtagatttcccgacatttgggaatcctacaagtcctacatccgcgatcactttcaattccagatctacatataattctttcgccggctgtcctggctgtgcatattttggaacctgcatggttgcagttgcaaaatgctggttaccaagaccacccttaccaccttttaagatgatctgtctgcgattatctccgaacatatctgcaatgactttaccggattctgattctttgataaccgttccttccggaactttcaggacaatatcttccccatctgcaccatggcatctgcgttttccgccctgttcgccgtcttttgctgtaaattttcgtttatgtctgtaatcctgaagtgtattcagtccttcatcgacttcaaatataacgtctccgccgcgtccgccgtctccaccatctgggccgccattcgccacgtacttctcgcgccggaaactcacatgaccgtctccgccttttcctgctctaataaatatccttgctctatctgcaaacatactgtattcctttcatctatataaataaacggaagttaaaaaaagcgcgctgcatcataaccgaaagaagttaatcattgcaacgcactttttcaactcataattaagctactggatagatagaaacctgtttcttatcttttccttttctttcaaatcttacaacgccatcaacgagtgcgaataatgtatcgtcaccgccgcgtcctacattgattcctgggtgaatctttgttccgcgctgtctgtaaagaatgttaccagcttttacaaactgtccgtcagctcttttagcaccaagtctcttagactcagaatctctaccgttctttgtagaacctacaccttttttatgagcgaaaaactgaaggtttaatttcatcatggttgttacacctcctcgaatgttaaatcaatatattctgcatagttgtcatcatctaccatctgttccagaccaagaatcattgtgttcagcaaaagctgtgcatcttttgaaggatgattcagatgataagaaatcattcccatctcatcttccgaaatcagactcgcgtcatcttccgtaaattcttcaattgcattgattgtgttaatcaccaggatagaagcagcggcacatacaatatcctgtcctggatctgcatattcagcatgtccttccgtctgaaaacctacacattctttatacttgttctgaaagatcgttacatgaatcatggatgctctccaatattaagcgttgattttttcaatcttaactgcagtatactgctgtctgtgaccgtttttcttatggtatccagtctttctcttgtacttataaacgataacttttttagctttaccgttctcaactacagaagcttcaactgttgcacctgcaactgtcgggttaccaacttttaatccgttgtcacttactgcaagaacctggtcaaatgtaaaagtttctccagcttctacaccaagtttctctactttaatgatatcgccttcggctactttgtactgtttaccacctgttgctataattgcgtacatatggcacctcctattatcattactcgccagttacggtgtctgactgataatttcagcagaacttcaacctcactgtgcggcatactagaagataatagcatacgtttttccaaaatgcaagtggtatccggaatattttttgtttttttacattttttgtatcatcaatattttgcagccttcttttcttacttctgtctgctatattcccagcaatttctttgcattttctgaaaagatggcagccttctcttcctctgtcagtggcatatgctctaacaacgccacaaaattcttctgatctgcccacggagaatctgttccaaacagaatcctgtctgcaccatgcatatgtacgatccgtaagaactgttcctgcagcattgtattcagtatgactcctgtatcaaaatatacgttctgtcccaccagataccgttccacatcatcccacatttcattgccgcccatatgtgcaagcactagtttctccggttttacatcatccagaacctttcttgccatcttcggtgtacagtgtacatcctccggacattttggatcaacacccgcgtgcaccactgtgatcagtcccagttctgatgctgcatcaataatacgttcatagcggatattgtcaaaatacatatcctgataatccggatgcagcttaatccccttcaatcccagattctttatttcttttaatatctctttataattctcacattccggatgaatcccgccaaaagagatgacaggtccttccgtatacgcagatgcaaaccggttgatcgatgcaacctgcgataccttcgtcacagccggaagtgcaatagaaatatcaactgctccttttcccatagaattacaaagtcctgtatatgtcccatccgcaaacggacttgctccaaaaatgccagaaagatagtcgagcgtacgcccggctatcttatctggaaacatatgtgtatgaaaatcaatgatcatcttgtgtcccacattctttcaatctgtcataacagtaaccaataatgtctcgtctggtaataataccgataaaatgttcctggtcgtcgataacaggtacaaaattctgttccatcgcacggccgatcagatcttccatgtctgactcagcagttacacactgatagtctacacggcgtttgatcttcataatactgatatcttctgcttcctttatattaaagatatccagcttttttaatgcccacaggacatcaccttccgtgatcgagccgacatatttcccctctttattcagtatcggcacacacgaatacttgtgatattccatgatctccatagcctgtcggagtgtgtgatagtcatagatatatgccagctcactctttggcttcaggaaaaacataatattcattgctaataatagcctccccaattcttaattacaatttacaagcattgtaatgttcttacttgcaaagttaaatatctttcttgttatctacgcgagatcctaaatcattgtttttacgaaaatatcataaatcgcgttgattgcggcatcaaaatcatgacttctgacaccaatgataatattcagctcactggatccctgatcgatcatcttgacattgacattcgcatgtgcgagtgcagcaaagatacgtccggaagttcctctggttgcacgcataccccttcccacaacagcgatcaacgccagatctgattccagttccaggaagtcaggctctacggctctgtggattccggcaatgacatcctgttctttttcttcaaattcatctctgtgaacgaagattgtcatcgtatcaattcctgacggcatatgttcaatggaaatattattattttcaaacacctccagaaccttgcggcagaatccgacttcggaattcatcatcgctttttcaatcgtgatagaagcgaaatccttcttacctgcgatacctgtaattgtaaaacgaggttttctgcaagtatcttctacgatcagagttcccttatcttccggtgcattggtattgcggatattaatcgggataccttctttacgtaccgggaagattgcatcttcatgaagtacagttgctcccatgtaagacaactctctcaattctctgtatgtaatcacatcaatcggctttggattcttgatgattcttggatcagcgatcaggaaaccagatacatctgtccagttttcatacatatcggcatgtacagcctttgcaacgatcgaacctgtgatatcagaaccgccacgggagaatgtctgaatacttccgtctggctttgcaccataaaatccaggaataactgcacgctctgtattctccagcctttcagaaaggatcttgtgtgtctcatctccgtcaaaatcaccattttcatcaaagacgattacttccgcagcatcgatgaattcatatccaagatatgcagccatgatgataccattcagatactctccacgggaagccgcataatctctgccgattttcttgctgaagtttgtacggattgttttaaattcctcatccaggctcagatccaggttcaatcctctgatgatgctgttatatctctctttaattgcctctaactgttcttcaaaatctctttccgcatcttctccaagaattgcctgtccataacagctgtataacatatctgttacctttgtatcatccggcgtacgtttaccaggtgcagatggaatgacatatcttctggattcctcttttctgataatgttacctacttttttaaactgctcggcacttgcaagcgaactaccaccaaattttacaacttttttcacttttcgtattcctccaaccaagtattttctgaaatgtattcatattcttccgctataaaaacgtaactgtatttatcttacatcattttcgtgcgcacttcaatgcaataatgtgttaatatgcacgtgaatagcggatgatttttagaactactgcataaatatacatacttttcgtctatacacagatgctctgcacaccatcaccacatctggttatggacggatcacatctgcaaattctgcttttgcaaccttttgaaggtctaacggtgcaagcctgatctgcattccaagctttccgccgctgacatgcatatattccagctcttttgcatcttcctggattacggtaggaaactgtttcttcatgccaatcgccgtacagccgccgcgcacatatccggttactttggtcagatcttttaaatgcagcatctccagtgatttttcaccgacaacttttgctgcctttttaaaatcaatctctgcttcgatcggaattacgaatacataatggtttcccgtcttccctgttgttacaagtgtcttatagaccagtttgtggtcatatccaagtttgtctgcggtctggataccgtctgtaaaatcatcgcattcatactcttcatatgtatacgagacttttgcacggtccagcatacgcatggcatttgtctttacttcctttttgctcattgttttatcactcctgtcagattaatggaagtccgttatatctgtgtcattttagtaatcactgtaaatgatctccggatttattttataaaatatcttttccaagaccttccagtgttataaactcagtctgtccttctgccgcctccggattctttgcatacacatcaatgcggtggatatgcaccggtatttcttccggatcttctcctgcgaattttaagaacgcttctgccaccagatccggcttcagattctgctcacttcctgttgcaaggtacagatagatgccatcgtccaatgcagtcattttgtagatcattggtttgatatcgacttctttttcacttcgctttgtcttctttaacacaacgatctccggctgtgccataaatgcatccaccttctctttccagctctccggaagtgtacgaatctcttccgcatgctggaatgtctcaggaaatgtcactttataatctgctgcagccacaatcgtcataccgcttgcttttttatccgatgagatttcgcggaagcttatgacttctacgccctccaccatcactgcatttaactgggcaaccgccttctcggaagaaatcggttccgtaatctcgatatcaaaatattctccgtcactcgtcacgccaactccaagcggctgcgcaaacgacatgatcatatgcggactgtatccggttgtaaatgcgatcggtatctctgcgcgccggattgctttctggaaataacgcatcacgtccaggtgtccgatgaaacgcatgactccatatttacggaatttaattcttattttcaacacagacacctcctttccattttgcgacaccgcagccggaacatttcatacggcagttcggtgttacttcggcattcattgcctgattccattctctcttcaggaattctttcgttacaccgatatcaatgaaatcccacgggaacacttcatccagcggacgctccctgtgattatagaatgcgatatcaatgcctgtattttcaaacgcctgcatccatttctcattatcaaattgatcgctccaggagtcatacagacatcccagacgatacgcttctttaattactgctgccgtctttctgtcccctcttgcaaagacaccctccagcacagtaacctctgcatcatgccagttatatctcaggctctttctgttaagctgttcattaaatgcatgctttacaatcgctgctcttgaaatatattcttcattcgtatacattcttgcccactggaacggggtgaatggttttggaataaagaacgacgtactcgttgtaatctgacactttccattccgctgatccttcggaatctcgtaataacgtctggcgattctgtcagcaagttccggaatggctctcatatcttcttccgtctctgtcggaagtccaagcatgaaataaagctttaccttattccagccgccatcgaacgcctgtccggcacctccgaggatatcatcctctgtaagccctttattgatcacattacgcatacgctgtgatccggcttcaggcgcaaatgtcagactgctctttctgatatcctgtacctgtcccatcacatccaaagaaaatgcgtcaatacgaagcgacggaagactgatgttgattccctgcgacttaaagttctcgatcaggaacattacaagctctcttaagtggctgtaatcactggaacttaaggagcttaaagaaatctcttcatgtcctgtattcttcagcatcttgtatgcatattcttttaatacttctacatccttctcacgggtcgggcggtataacattcccgcctggcagaaacggcatccgcggatacatcctctctgaatctcaagcacgacacggtcctgtgttgccttgataaacggaacgaccggcttttccggatacgttgcactgctcatatccatgactacctgtttcttgatcttttcttttgcatgcggattatttggacggaagctttcaatcgtaccgtcttctttataagtcacatcatagaatgccggaacatagattccttcgatctctgctgccatctccagaaattctttcctcgttccgccacgcttcttattctgtttataggcatccagaagctcatcatagaccgtctcgccttctcccatatagaacaggtcgaagaactccgctaacggctccggattatacgtacacggaccgccgccgatcacgatcggatcttcgtccgttctttcctctgctgccagtgggatgccgctcagatccaaaacctgcaggatattggtataacacatctcatactgcagcgtgattccaagaaaatcgaattcctttaccggatcctgggactccagtgcaaataacggaatctttctctctcgcataatctgatcgagatccgtccacggcgaatagacacgttcacaccacacatcttcgcgcttattgaacatatcataaaggatctggatacccagatgcgacatcccaatctcatacacatccgggaagcacatggcaaatctaatagacacctttgcagggtctttcatgaccgagttcacttcatttccgatataacgtgccggtttctctatttttagtaatatttcatcatttaacgcaagctttctcattaaatctccttgtatttttgtacatgttgcacaataattttcttattgtttttttcgtaaatctttaattattttcttttttcgggctttttttctgcctgtttttactgtttttcgccgcattttggggtcaaaatcgcggagtactacaaaacctgtaaaacactaaatgctgactaacgttttgcaatgttcagcaatatttaccaatatataataatatatggtaatcagttaggagtcaatcctatttacaagcatctttttttgttcttttttgaataactattcctttgatttctggtcaaaaatcacctcaaagattgttccacctgcagggtttgacttaatgctgatactgccatcgtgcactctcacgatctcatgaaccagagcaagtccaagtcctacaccaccaagctctcggcttctggatttatccacgcgaaagaatggttcaaatacacgttccctgagttctttcggaattccgcttccggtatcctctactgacaggtaaatatgtttttgttttttgtatgcatttactgtaacctgaccatctgaatgattgtattttatagcattctcaacaagattatataccagcctataaataaggatatcacttccaatcatcgttatattcttatattttccaataagttttatattcttttcctgtgcaagaggttccaaatcttccaatacctcgtcaacgagatcattaaggataattttttcatcccgtcctacagtctgaagctcactcatgtcgagaagtgtttttaccatcttgccaagcctgtcattttgttccgtcaacatctttatcatctgtacggtgtctgcatcactgcccggatgctgagtggaatgatacaagtcaagctgtacctgcattaacgataatggagttcgaagctcatgtgctgcactcgcagtaaattgtctctgtatctcaaatgcatccgagaggcgttcaagcatcttgttatacgaaacactaagctgattcagttctttaatcttacattcttctattcccgaatctgccaggttttgagcctgcacttcttcaattttatcagaaaactcacgaattggtttaagcgcatgtccacttataaaatatgcggccactccaccaaggagagccaataaagccgaaactatcagactgtttcttttgtagtcttctttattattgtacacttgaacagaaaaatcatttgagaactcatcccacttatcctctggtatgctgatgtatatttcttctgaaccacctccgctgtcatctccctgagcgtcaacagccttttgcagggaatccatataatacacaccatttttatagacaaacattgtcaggcacccacatataatcgcaatacacaatgtagttatacaagtaagtctccactgcagtgacatttttttcatcaatcagactcctctcgtattttatatccttctcccaccttattcataattgcatcatatccaagcactgccttaagctttctccttagcgaagacatatgcacccggatggctccactgaagctatccacagatgcatcccagacatgctccatcaattcctcctgacttaccggtcttcccaggttaagaagcaaatattccaaaattcctttttcttttcttgtcagggaaatctttgtttcctttgcatatgcctcacgttttatcgtgtcgaacatgatatcgccgctttccagacatacatccttttgtacaaatttccttcttgtcagacttctgatacgagcctcaagttcctgtagatgaaacggcttttccatataatcattcgcaccagcatccaacccttcgactttatctgcaatctgccctcttgccgataatataagaacctttgtctcctcattgctctgtctgagttcttttaggatttccatcccatccatgccgggcagattcagatccagaacaatcaaatcataattttctgtcaggatgtattccaatgcctcttccccatcataacaggtatccacctcgtacccggcatcatacagacttttcgcaaccgcatcacatatttgtttttcatcttcaactattagtaatctcaaaatcattccacccgcttcttaacgaaaatttcacactaactattgtataataccgaagtcagctggtcaacaaatacaaccaacgaaaggagtaacaaaatcttgaagtgcaaaaaaatatttcaatttgtaatattcatcacaggtacagccatgattggctatggtgtgatccgaggtgaagctgctgccgtctttggcaaagcaataaaattatgtctggagtgtgttggaattggataaaaaaacgaaattactatcaaaaaaagttgccagaatacggggatggatacaagcaattgccacattacttaccaatatccatattcccaatttacttaaaggcaaaatatatcagggcaagattaaaacagtatgtgtgccaggattaaactgctattcctgtcctgctgcaacaggcgcctgccccattggagcttttcaggcggttatcggatcctcccgatttaaattttcatattacataaccgggtttttcattctactcggtatgatactcggaagatttatctgtggttttttatgtccgtttggctggtttcaggatttacttcataaaatccccgggaaaaaattttccacagcccggctgaaaccgctaagatacctgaaatatataatcctcattgttttcgttattcttctgccattgtttgtaacgaactctataggaatgggggatccgttcttctgtaaatacatttgcccacaaggtgttttggaaggagccataccactgtcacttggaaataccgctataaggtctgcacttggaacacttttttcttttaaatgtcttattttaattacagttgttgtgttgagtattttgttttacaggccgttctgtaaatggatctgtcctcttggagcaatctattcattatttaataagatcagctttcttaatattaaggttgaaggcagcaaatgtgtcggatgcaatcaatgttcaaaggcatgtaaaatggatattgatgtgtgcaagactccaaatcatccagaatgtatacgatgcggggcttgcatcaaggcttgtccaaaagatgcgatccaatatcagtttctgggaaaaacatgccccaaaaaagaacagtagcaatcaaccataaccaaccggtaactattaattttattactattattttaaggagcaattatctatgaaaacaaaaagaacatttttctctattttaacactttgcatagcattattatttacagcatgcagcggaaaagaagctgcaagcacagaaaaatcgcaggatacaaaaactgaatccagttccgtatctacggacgattccaactctaaactagataatttatatcagcaggagaatcagatcttcgcagatcacgaagatgtatggaacaaagcatttggcatgatgagcaaaagtgctgcagatcaaaatggaaactatgcggattatctggctgacactgttgaatcaaacaaagactcttttacagatgacgagctgaaaacacttaccgctgatattgaaactatccgaaaaatcgaggaacagatcgctgagattgaaaagaaaaatacaggatctgataacaccgatcagaaaaacagttccaacgacgcatctcctttcaagaatttttctggtcaggattatgatgggaattctgttgatgaaagcctgttttccaaaaatgcagtaactgtcatcaatttctggttcaccggctgcaaaccttgtgttgccgagttatctaaacttaacgaattaaacgatgcaatcaaatcaatgggcggcgaagtcgtaggcatcaatacagaaaccttcgacggaaataaaactgccataaaagaagcaaagactcttctcaagagccagggtgctaaatatcgcaatctttccattgactcttcttcagatgcagggaaatacgcgtccgatatcatggcatttcctacaacaatactggtcgatagaaatggtaatattgtaggtgatccgatgctcggcgggattgataatcaagacaattatgatactctgatgaaacagattcagtctgtcatcgatgctgatagcacaaaaaatggtactagaatataaatagtacaagccaaaatgagaaattccaaatacacataagcatgataccatagaggcatgctgaaggaggatctcatatggcaaagcaacatgacaaacaatttaaacttgatgcagtccagtactatcaggatcacaaagatctcggagtacgtggatgtgcagaaaatcttgacatcggatacagcacattaacaaaatggctgaaagacttccgggaatcaggtgatattcctgttcgtggttctggtaattatgcatctgatacgcagaaggaaattgcccgtctcagacgtgaattacgtgatgcccaagatgcacttgatgtgttaaaaaaagcaatcaacattctgggaaaatgacggaagtcatttatcttgaagtgtctgagaagacggaaactgcccaaaaggttggacgccgggtttccgtctccggaatgttgaaatttttaggtgtctctcgctcaggatatcttgcatggctccaccacgtaccttctgatacagaaaaacgtcgtaaagctgtaaaagcaaaaatacaggatatttatgatgattccaagcagaactgcggtgctccgaaaatcactgtagaacttcgaaaaactggtgaagtcatttcggaaagaaccgttggtacatatatgcgccaaatgggaatccgtgctcagtggagcaaaccatggacgatcaccacaaaagattccgatttcagcactgaattacaaaatatccttgatgagcaatttaatcctgatcgtccgaatgcagtctggtgttcggatattacctacatctggacaatagatggatttgtctatctgaccagtgttatggatttattttccagaaaaatcatggtctggacgctttcagaaacactggaagtatcttgcgtgattgatactataaacaaagccaaagctcgccgaaatatcgatcaaccattaattatccattcggagcgtggcagccaatatgttgcaaaggaatataaaaaagcaaccgaaaatatgcagcgcagttattcgaagaaagctttttcgtgggataatgcatgcattgaatcctttcattctattatcaaacgtgaatggctcaatcgctttaaaattcgcgactataagcaggcataccagttgatttttgaatatctggaagctttctacaatacgaaacgaattcatagccattgcaactatatgtcgccaaacgaattcgaacgagtgtatgaaagaacgcacactgaggctgaacttctggcaggttaaaatggggagaaatttctcattttaacttgtactaaatcttgacataggaccagatatagctaagtaagaacataaaaagaaacgaaggcactaatgcggagacgcgtagcttttatggccagtgctatagactttcacaatatgatcaagagcttgttgaaaagctatcatggaggcaatggcaggatatattagatcgtgttggaaacagagaagatgaaagaatctttgaatggattcgccataaaagtgaaaaaattagagaagacgattggcgtgaatttgaaaaaggattacatctatatctaatatatctaaaaaataaagatacatctgtttttacggataaagagttgtttgcaatatatgaatcgattcttgagatggctaaatactggagaatttcatttgggcagttctctaaagattttccaaatagcgcaaaaataaagagtaaggcgagacgatcaaagaaataccaagcagaatgtttcagaataaaaaaagatttgagaagagaccttgatgaagagattttttcacaagcatttgaaaatgcgatgaaataatattgttgaacacacttgtgagtacattgcaaaattaatccgatatacggtaatttttcgacattgctatttgacaataacacaatgaacctcaaaaagtcgtattttaggtagttcattgcttgtgttaaaaaatctattcagtagcgtgactttagagaaaggataacataaatcaaattaaatatatcacataaattcaaataataatagatgagttggaatattagaatttttgatctgaacacatttgtgagtatattgataaacgaacaaatattcgatataataccaagcataggaatttaacttatcagattcgctacctgataaaaacacaatcaaaaacttaacaggaatgtcacggcctagtgacaaatcccttttcatggccggacagaagttatagataatctccgtagaggtactatgtcttctgtccggtcttttcttttttgaatatatttcaatcaatcatttttgacttgaacgaaactacaataataaaatgatatttaaaaatattgacaaaacaaacaaatatgatatactaattgtagcataaaacaaaaggaggttctggttgtgaatatagaagaattgaaacaagctattgaagaagcaacaattggactgtacgataaggatgaattgcttaatcttattcaagaagcgtctaaggagttagagaatcttgaagcagaaagagataaagtgaaagcaagtttagagtcgatggaagaacagtatgaactcgctggggatgataaaaaacgtataaaggaaattgcggatgagtatgggtttgagtatgatatcaaggttcgtcatggcgagttgatgatgttatgtaaagagtacgaggacggaatcaagtctttgcagcaggagttgggtgattatagaaactttaataagcgtagatgttttgagaatattcgattccttctgaaagaaaaaactgatgttaaaatcggacagattgagaaagaggctggtgtcagtctaggatatatgtcacggatggaaaaaccaggtaattcttcagaaccaagtgcggagttcattgtaacagctgcgaagatgttaggagtaagccttgacttgcttgcacttaccgatatggctgtaatgaatcctacagaaaagtatcttgcaaccttaatggagaagctgaataaggataccattgcggataagctagagtggcaccgtgactctgcagatagtttaaatcgcatggaaacagatatgaatggaaatattgaacatccattatttagtatggagacattctatgaggaaaccgaaatggaatatccggaagaggtaacgagaattgtattcacttctcatacctttgattgtcacacttatattaacggagaatgctttaggctgaatatgaaaggtgattcaacactatatttgatggacattagcaaaagtgtacatcgcgtaaatgatccaaatgcgtatgcaaaagaaatatggataaatactccgggagttggaacacagttcttaacaagtaacagagatgtttcacagctatcagagttagttgagatactgtttgatactgttaagagaggttctaagcacccaaaaatcaaaaaaaatataaaaagtgtattagatgcatttatcgatcatgatgatttaggtgaggacgataacttaccgttctattaagaggagggctatgaatgaccaaaactgattatccaatttacgcagaagatgggtctttattctgcaaaaaagttgttgatgaatacggagaggagatacttgaaggaccaaaaggtaaaagaattacttttagaaacttgtcagcacaagtatttaacccagcaactgcaaataaaaatcgtggaaagataaagaaagcacgatagaaaataatactagaaatccctgcaatatggccataggtatcaagcggagtatttccaccgaggatgcctatgctggaatgcatgaatgtagcccataatcatattggtaagccagaggaaatcagtaaggaaaaatttaatatgaaaacacttaagagcaaaccgcgtggaatggaactcacgactgagagagcctgagtagttttaacgattggagaaatccattgataaaactattcgggctctttttttgttgcttggaagaaactaagccgaaaagaccctaacctatatacttctccatttagaaaaatttcagaacgatttttttcagtaaaaacaaaatgtaaatggagaagtaaatattagaaacatctgacaccgagatgaggctacaaaacctttgtaacttcatctgagtgccagacactcaaaacctgtcttaaggttcatcccctgatcaaggatgcccagagccgagagacagcaacagattaataacagtcaacccactgggacggttggccatttaagaagtgaggattcattcttatggccaatatttatgggaagttccgtgtggattctcacttcgatttcagatcgaaggaggatctacaatggaaaatttacagacaaaaagtgaaaagcagtattacatccctatggaggtaaatgaaacatcaaaggaattcatcattgcaaacggttataacttatcgaccgatgcagtatgtaccaagattggtcatcgcacagttcgtgccatcatgattccggcaacaaaggaacagtacctggaatacatgagacctttgtggagagaggacaagcagggacagagagcaagcaaacaggaagatgaaagcaaaatgcaaccagtatcactggatcagctttacgagagtacagaatacgaagtatccgatggagtcgatttggaagccaaccttataaagcaggaaatgattgcagaacttcatgcggctcttgatgaactggaagagatggaccgcaccattatgacaatgttcggtgacggtgctacagaaaaacagattgcagaggttgttcatttatcacagaagggtgtcaataagagaaaaaagaaggttatggttcagcttaagacaagactgaaagattttgaataagtaacattctatctgctcatcacttccaatatctgtggtgagcagattttttcaaaaatatttttagaaatggtacttagaacagaaccggatgtccttttactgttagagaggcagtaaagctactcgaaaaggatggtgtcaaatatgacaattaaatgcagaacaggcactgaaaagtgcgacagcaatcagcttgatacagagcttatcaatacgcttgttgtcatcagtgtagtgtcaaaaagacttgctgagaaattgaatacactcagcaaacaggaaaaagccggggaaggaggaaatacaaatgggaaaggtcagtgaattatcacagcttatcgaagaactgaacagatgtggtaacacattcatcggtatctccgaagatctgaagaacctctttagtggttcagaagaagcagaagaaacagagccgaagacgaaagttgctaaagaaacacctgcgaaggcaccaaagaaagaaaaaactctttctttggaagatgtaagggcagttatggcggataagtctcgtaagggatatacggcagaagtcaaagcacttcttaccaagcgtggtattaacaaactgtcagatgtggatgcgaaggattatgcagcactccttgctgaagtggaggtgattggagatgccggataaacacgcagtactttctgcatcttccagtcacaggtggctagcctgcccgccgtcggcacttctttgtgcaaaggaaaaggacaaacccagcgaatttgcgatgcagggaacagacgctcatacgctttgcgaatataagctgaaaacagcactggggcagcagtctaaagacccggtagagaatcttactttctttgatgaagagatggcagattgcaccgatatgtatgcacagtatgtgatggagcagttatctgtagcaaaagaaagatgcagtgatccaattgtttttatcgaacagcacttggatttctcgcagtgggtgccggatggatttggtaccggagactgtatcattgttgcagacgaaacacttaccgtaattgatttcaagtatggtgtcgaaattctggtagatgcagaaaacaatccacagatgatgtgctatgcactgggagccttatctatctttgatgggatttatgatatcaaggaaattacgatgaccatctttcagccaagaagagagcatgtcagcacctttacaatttcaaagaaagcattgctttcctgggcagaagagacacttgcaccaacagcggagctggcgtcaaagggtgagggcgaatacaaagccggaagtcattgtcagttttgtaaggtcaaagctgtctgcagaaagagagctgaatacaacctggaacttgcctgttatgattttgagatgccggaaagccttgaagatgatgaaatagaagtcattcttgcaaaagcagacgagctggtatcttgggtaaatgacatcaaagaatatgcgcttcagcaagcagtcagcggtaagaaatggaaagactggaaattggttgaaggccgttccaaccgtaagtatgtgaacgataaagccgtagcagaaaagattgagagcgccggatatgatccgtatgagaaaaaggtcatcggcattacagccatgacaaagatgctcggcaaaacaaaatttgaggaattgctctccgggttaattgagaaatcacagggcaagccaaccttagtacctatgtcggataagtgtccggcaatgaaaaatacaacaatcaacggttttaaggaggacaactaatatgtcaaataattataagaacccaacgaaagtaatcacaggacctaagacaagatggagctatgcaaatgtatgggatacgaagtcaatcaatggtggcacaccaaagtacagcgtgagtcttatcattccgaagtctgatgcagcaactgtcaagaagattgaagcagctattcaggccgcgtatgaggaaggcgagtccaagcttaagggtaatggtaagtccgtaccttcgctcaaggtactaaaaactcctctcagagacggagatttggaacgcccggatgatgcagcttatgcagatagctacttcatcaacgccaattctgcatctgcacctggtattgtggatgcagaccgtcagcctatccttgaacgctctgaagtatacagtggtgtttatggtcgtgccagcatcaacttctatgccttcaactcaaatggaaacaagggaatcgcctgcggtcttaacaatctgcagaagattgccgatggagagcctcttggcggcaagtccagagcagaggacgattttgcaacagatgacgatgatgattttttatcttaagaaagggacaggtgacaacacatggaaacagcacaggcaattttagtaatcgtattattcgcggtatggtcatgcatcagcatttcatttctgatcacatcgatttagagcctgctttatgaccgcagacgtgaaaagagagaggttgaaaaggataaaagagacctcgaatatcacgaaaagagaatgaatgatttcaagtaaaaacaagtatatcaaatgacggtggggcggcaggagcaatcttgctgccttgctttttaggatggtgacagaatgaaaaatatcagtattgatttggaaacatatagtgatgtgaatctgcagaagggtggtgtgtataagtatgtccagtcttcgaattttgaaatcttgctgtttggatattcagtggatgagggtgtagtcaaggtggttgatttggcacagggagaggaaattccggatgagattttagatgcactcacaaatgaacagatcacgaagtgggcgtttaacagtcagtttgaaagaatctgtctgtcggaatatctgagaagatattatccgcagaagttcataagctacagcattgcagaagatacggtgggagattatctgtctccggtttcatggaaatgtatgatgacctggtctgcctatatgggacttccgttatcactggaaggtgccggcaaagtactgggattatcggaacagaagctgaaagagtggaaagacctcatccgttatttatgtgtgccgtgtaagcctaccaaggtaaatggtggcagaaccagaaaccttccaaagcacgataaagaaaagagggatgcctttgtaaaatacaatatccgcgatgttgaggtggaattatccatccaggggagattgtcgaagtttccgttaccggattttgtatgggaggagttctggcttgaccaggaaatcaatgacaggggtattgcttttgatatagaagttgctaaaaatgcgatagtattcgacaaacattctaaggataagctgacagcaaagataccgcattcgacaggaatcgacaatcccaacagtgtgatgcagatgaaggcatggctgtcggaaaacggcatcgaagcagatagccttgataagaaggcagtgaaagaactgattgctagtactccggcacatatccgtgaagtcttggaaatcagacagcaacttgctaagtcttccgtaaagaaataccaggaaagaaatcaatagtatggagatgctgcacaagagtggaaaatggaccattgggttgcacagcaccgacagtgccggaggaagaacttcaacaggcagttatcgatgccatgaatgctgtattggaaagttccaaggatgtgatagctatattggaagagaatattctggaagttatcagccaagacaattctgttgaaattgaggaaattaacaagaccattgcagaaaagcaaaaggaactcttggaattggtacacagcaaaaaagattattcgaaatgtgccgatgaaatggaaaagcttaggcagaataaacagctacttttggtaaagcatgctcagaccgaaggcaccagacagcgaatcaatgaacttgcagcctatgttaaaacacaggatactcagataaccgagtatgatgataagctagtaagggaatacatcgatcagataaagatttataacgataagtttgtggtctgctttaaggtcaagatggaaatcaatgttttaagataaaatataaagaaattagcagcgtccagacggaagtctggacgttttaatttgcaaataataaaattatatgaaaaataattttgaaataattgcgatatattgacaaatatagttgaaatgtgtatgataaaataaaaatgtacgataaggagaaaaattatggctgaatcgaagcatgataaatttataagagttgctgaagctagaacaaataaaattattgatatgattcgacttttaagtaactgctctaataccgcaacatatgaatacactgatgaagacgtaaaaaagattttctctgcactagaatcagaattaaaaacttgtaaaagcaagtatcaggataatagcaataaagaaagaaaatttacgttgaggtgatttagatgactattgaatggaagtttccgcataatggatttggacaagtgcgtggagtatcggacgcaggcattgaaacctttacaggaacagagatacagtcgcttgcaagagaaatttgtcaaaactcattagatgcagcggtggaaggcagtaatgcgaccatcaaagttgattttgaacagtatagaattccttcttctgatattcctggatatgagcagtacgcttctaaaattcagaaggcttatgattattggtcgaaaaagaatagtgaaaagaccattaaggtactgacaaaggcattaaatgcaattaagaagcctaatacagttgttttgcgaattagcgatttcaacacaactggacttagccatccatatgaggatagtgacgaaggttggaatgccttgacaaaactcgatggtggtgcgacaaagacgggtgataaagccggagcatttggaataggaaagaacgcaccatttacaaattcggattatagattagtcttttatagaactctaaatgaagatcaagagactgctgcacagggaatgtcacgctttatatcttttccagaagatttaagcaatagtatgaatacgatgacaactggaattggttattacggaaatccggaaggtaacttacctgttgattctatcagtgagttggaaaaactatatcagagaactgagattggtacagatgtttttgtgtacggatttaatgcgggacatgaatggaatagcgatgtaattaacgaggttctagaaaatttcttgatgtctattcacaagaatttattaagtgttacagttgacaataaagtcatcgataattctacgcttgcaagttatctcagcacgtataactcaaaaataaaaaatgcatattggtactaccaagtccttgttcgacctgaaacaaaagtgttcaaaaaggactttcacgggatgggaactctaaaacttagcgttctggttgatccttcggagaaattgaatagaaaaattctcatcactagatcttccggaatgaaattatttgcattgggtaatatgtcgagaattatttcattttctggtgtgcttgaaatggaaggtaaagagcttaatgaattctttagagaaatggaaacgccagcacatgataagtggttgccaagcagacactcaacaaatgtgccgcttgcaaaagaatataacaatgagctaaaggattggataagaggctgtattcaaacgttgggcgaacattccagtgacgatgaaattgaagttgcaggtttggctggtgttcttcagaaggaatcggataagactaatcagcgtggagatgacagcaataaagaaagtcttcaagatacgattggttccattacaattcagcctcgaacatcaaaaacaaagccaaagggtttattttatggcaatgatggaaatggaaagtcgaaaaacacggatacggaaggaaccatcggttctgatggaggtgatccaacaactcggaatttaggcggtactagacataggagtaaaaaggattctcataaaggaagagtggaacaaggtggacatgataccgtacataaaagatatggtggagatataaaccaagaacttaagaatgttagagttataaagacatcgagaaacacttatagagtttcctttattttgccacgggatatttgtgcagggcatgttgagattgttacagttggtgaaaatggtaaatcaaatcgactggccatccattctgcatcagagttgatggggtgcacaggaataaagaagagttcggaaggtgtaagtttttctagtatgaagggaaacgaaaaagtccagtttgaaatcgctttgcttgataaccgggattatgcgatggaggtaaatgtatatgaacataactaaaagattatatacatatccagttctaagcgaagaaagagatgattacactgattctgtctttgatgcagatgtgcagtataaaatgaatggtgttaataatttgttgtttgatttcgatatagaaatggataacaaggaacttcagaaaatgatcctggaaggtgatgctgaatatgtgattcatattgaatgcgcaaacacatcatatagaactacgattcatgatatttccaatcacgtaagcaaagaaattccgattggaagaattaacggaagaatagaaattatcgttttaatagtgacaaaaaaagatgttaatcattttgtgaattctaattgggacgatgattatcaagggctgtcattcgaactgtcgaaaggaagtattcttgcgtataaaaatataccagctattgatattgtaaagaattacgaagaatttaacagcgcaagttcaatttttaaggtgtataagcggttaacaacagaaccaaaaccaatggaggtggaattgtcaactgcacaaattggtatcggtttgggattagaagagtatgagatttattctcgtttctgtgacaaagaagaatttcaaccaatattgaactccatgatggttttccctgccttagtatatgtttttgaagaattaaagcaagagaatggcattgaaaattatgcaggtacaaattggtatatttctttatcaaaggcttatgagaaacgtggagtagacttggaaaatgagatgttatattctgataagacctctgtgcaattagcacaggaagcaatggaattaccgttgaatgctgcgttgagaaaatttgcagatttgtttgaaactggtgaggaagaggaggatgtctaaatgaaactatattttatgaaaaaagaagcactggacatccttaaatcaaacctcgatatggtttacaacatgtatttcacggaaaaggataataaatggctttggaaggtctgtggaggagatccgtttggcgaatttaaggagatacaagatttccagttggcaccgattgattctgatatgtcaaaaggtgaagttgagtttgcaaactgtaagattatttatcagcacttgtcatttttgacagagtcacaggcttgtgatgaaagactgtgggcgggtctgtgccattcggtttattacgattaccttagaaaaagatgggactatgatacaaaatcacctaaaacacagaaagaggctgtatcaaatataaaatcgagatttttcttttctggtggtacaagagccggattatttagaaattccatagccaagtgttggtgggttggaagaaatacctatgatccaagtaatgtagcaaatccatttgaaaaattggatattataggtagcaacgatattagtagtaaaatttccgatattttttacagtaataatttctctgcaaatccggttattttgaatggcatcgttaaagcattcaaaaacttcaaagaggaaaacacacagctttcactcaaggaacatataagaccaacattgcaattcttgaatgcagtaggcggtggagttgttttagattgtcttgatgaggatgagattgctgatatgctcattgataacatctatggcattttacaaggtgatgagcagggtgtagagattgaagaggaatccgaagagtatgaagatatggatgttgatggcaatgacatatcagaagaagaaaactctgaagatagtgttgaagaagagtatatagttattggtcaaaaagtcaatgttcgtattaaggaaaccgatgaaccaaaaacaatactggtaaattatcttccgaattccacaaagattccgccattggcaaaaagccttttaggctgctggattggagatgaggtttctttccaaggaaagacatatattatagaagcaattcaaaagtagagaacagttaaaaaagtgttttcagtggtgacactttttaacgatagtctcgacctatcgttaaaaagttcatgaatatgtttcctttcacgatggtaattcatagacagcagtcctttcatattgagacggttgtgaagcttgtgagaaaaaaatagaaaatatgcagatcgggcaaagaagattttgataatagacatttccttcagattgttggtttaaaaatacagtgaaaagagctatatttaagataaacgagagaatcggtacttacaaaggaggaaaagcttatgattatatgtatcggaagagaatttggaagcggtggccacgaaatcggaagaaaagttgcagaaaagcttggactggaattatatgacagagatttaatagacagggcagcagagaagatcatagcgatgccaaaagatgtgctggaaaaagcagatgagaaaaagcgtaatccgtggctgcatgaggtatggtatgatgtgccgaaccaggaactgaatggaatgacggcgaatgatgctttgcatctggcatataattcgatcatacgagaacttgcagaaaaaggagattgtgtatttgtcggacgctgtgcggactatatattggaacaagcaaagattgatcatattagtctgtttattgcagccccgtttgaatggcgtgtgaagagaaagatggaacagttgtctatagatgaaaagtctgcaacagccatggtaagaaaaaaggacaaagacagaaaagcttattacgactattataccggcagaaactggggaaggccatatgagtacgatctgtgtattaacagttccaggcttggaattgaagcaactgcagagaagcttgtagaaatgatccgggaattggaaaaataaaacttataagagccgggaaagattactagattggttcgggaatagaaaatgatgaaaagaatagaaggtctggatagcgtatcaactatccaggccttctgtgcgtatgatataatatcatttaaccgtagaatgtattttcttttatatccatatctttgagatcggaaatattgctttttcgctgatattgttcaacgaaaccggcgctgataataccggtaggaatagcaacgacaccaacccccagataagcgatgcagattgccattatacgtcccagagttgtgattgggtaaatgtcaccatagcctacggtaagaagtgtagaattgcggtaaataagccggaaaactgcgataactgcgaaaaagtttccataaaggtaaccgctatattgcagatttttatgtaaagcgttcagaagagtcagatatcgttaagcctttatttacagttctttccgtgcagatagaagaataatccgccgatgataaatccgccaccgataatgttaccgattgtaacaggaagaagattgacggtgaagaagtttccccagtttaaagcagcaatctgactgccggtgataccatataattctttcgcttttgcaacataatccggattcatagaagcaaagattccggccggaatataatacatatttgcaacgcagtgttcgaagccggatacaacgaatgccatgatcgggaaaaagatagcaagtgattttcctgctatatctttcgcggtagaagccatcaatactgcagcgcataccagaatgttacataagattccggaaatcagagcaggaaggaaagataagctgacctttccaagagcaactttgatcgtaaatgccccaagagcgccgctggtataattatattgtccggacagatataccagatatgccagagcaacagcaccaaccatattaccgatataaacgataaccagtgtccgtatgagtgcagctacactaatttttttcttaatacaggccattgtcatcatacagtcaccggtgaacaattcgcctccgataaagacgatcatcatcagaccgaccgggaagacgcagccggcaaccagacgtgcaagaccgacatttgcaatatcatgcatggcaacattactggactgtgcgccaagcgcgatgcagacaccagccatgattcccatgaaaaaaactttctttttagaagttgtagctttttttacagcgccattcatgttggcctgtacaacttcctgtggagtgttaaacattgaatccataataaccctttcctttagtactttttctttgtgtgattactttgataaaaatatcacataaaatatagcatggataacaaatcttgggcaacccgtaatcgcaatgtttatgctctttttttcgtacagtaccaagaaatatgctataatcgatgggaaacagatcataatgaaaaaaattatgcaataatgtaaaaactcaattatcaaattaagaaaaggagaattataatggctcagaatagttgcgaaagctgcacttattatacatacgacgaagattacgaaagttatatgtgcgatatcaatatggatgaagatgaatatatgcgtcttatttcagaccagcattatcagtgcccttattatcggaatggggatgagtatatggtggtgaggaagcagatgtagtttctaattaattcactaagctagctacccggaccggaataaaagttggaaaagcattcctgtccaacttttattccatgtgtatctaatgctgtagtgaattaatagaatccccgtaactattgtgagaccggaagtgtatctattaacctgagaataacaatttatgcagactctatctcataagtgaatcccgcatctgttatcgtctgaatagtatctttaataccctgaccacctgcggtaagatatccggaggcaaagatggaatctacaacacttaacaattccttttcatgtcctttaaaatacacttcacgtcctgctgcacagcggatgtctgactgcggaaccagaagtcttgcgagacagagcacctttatgccatattcataagtcagtcccgagatatcctgatcgccaagaggagtacccggaatcggcagcaggaagttgatcgggagagcttccggattaatttctttcagttccaaaagcatatctacaacgtcttctttgctttcgcccataccgatgattccaccgctgcagatctcgaaaccgagtctctgaagcatatgtatattttccacacgctggtcaaaagtgtgtgtggtgcagatgtgactgtaataattacggctgctgttcagattatgattgatacggtcaagtccggcgtcttttaacatttttgcctgtttttcggttaagaatccgatggagcagcagagatgggttccggtttctttcatcttacggatacgtccggcaagctgttcgatctctgcatctgtgaatcccatgccgcttaatccgatacagtggcgggaaagatgatgttcatttacaaaatcattatcattgtataatttttcgtcttctacccatttataagtgtcgatgtctgcattagagcgacaggattgcgcacagtaagcgcagtcctgagagcagttaccactgcggacattggttagaatatgaatgctgacgtggtttcctttatattttttacggaggattccggcacgttcgatgagagcatctaactggtcgtccggagtgtttaaaatctcgatggcctcttcgcgtgtcaatataggatcttcgtgtgtatgaacttctgaaatcatggtgttaccttcctttgtgtgtaatataaatcacttgttaactgatatagacaaaaggttaacatgacgggaaataaaagtcaactgtatttggtggaaaggttaacatctgcgatgctatatacagataaaaatcagactgtgattagcggatatatttctaaataaaaagcaaagattaaaaaagtataaaaatacggattttataaaatatttctgtataataataacatatgtctgtaaaaaaataacagatggaagaaggagaaaaagaatacatgcttcagatacagcatatttgtaaagaatataggaccggtaatctggtacagaaggcgctggatgacgtgagcctgaacttaagagataatgaattcgtggcaattctaggtcccagtggatcgggaaagactacgcttctgaatattatcggaggactggaccgttatgacagcggcgacctgatcatcaacggaatatctacgaagaaatataaggacagagactgggattcataccggaatcatacgatcggattcgtatttcagagttataatctgatcccgcatcagacggtgttgtctaacgtagaacttgcacttacaatttctggaatcggaaaagaagagagaagaaaacgtgccattgatgcgctgaaaaaagtaggacttggagaacaacttcacaaaagaccaagccagatgtccggcggccagatgcagagagtggcgatagcaagggcactggtgaatgatccggatatcctgctggcggatgaaccgacgggagcactggacagtgataccagtatccaggtcatggatcttctgaaagaagtagccaaagaccggctggttgttatggttacacacaatccggaactggcagaagaatatgcgaccaggatcgtgaatttgcgggatgggaagatacgttcagatacggacgaatacattgtggatgagcagacattaaaagaaccggaacataagaatatgggaaaatcttccatgtcttttctgacggcgctggctcttagctttaataatctaaagacgaagaaagcaaggacattactgacatcctttgcgggttctatcggtatcataggaattgcgctgattctggcactttctaatggagtgaacggctatatccagtcaatcgaggaagagacgttgtcggaatatccactacagatccaaagtacgggatttgacattacctccatgatggttgggaataccggaacggatgataagagcaaagactcgtccggtaagaagaacaaagatggtcaggtaaaagtcatggagatggttacaaatatgttctccaagatgaataccaatgaccttaaatcattgaaaaaacatctggaaaaggataatgatgcgttaaaatcctatacaaatgccgtggagtatgattatgatgtggatccgcagatatacagagaggattcggatggtgtcagacaggtacacccggacaaatcattttcatccattggaatcggagcagattccggtgccaacagtatgatgtcatccatgatgagtacaaatgtgttctaccgcatgccaaagaacacaagtctgtacgagaagcagtatgatgtcaaggcgggaagatggccgaaaaaatataatgaatgcgtactggtattaagtcaggacggcgggatgagtgattttcttctatatacacttggcctcagagatcagatggaactggatgatatgatcaaagcttttgcaagtgaagaagagatcaagacaccgtcttcactgggaacatacacctataaagatattctgaacaagaagtttaagcttgtgaatcaggcagactattatgaatatgacagccagtataaagtctggaaagataaaagtgataatgcagaatatatgaaaaaactggtggcagacggagaggatattaagattgtcggaatcgtgcagccggcagaaggttcgaaggcaactgcactgaatatgggaatcggttatccatattcgcttatgacgcatgtcgcagaagaagcaaaaaacagtgagatcgtaaaacaacaaaaagccagtccggatatcaatgtatttaccggagagaaattcggtgaagattccggagataatggtctggatatgaactcgttattcaacgtagatgaagacgcacttcagaaagcattcggcatgggagatacagaccttgcaggaagtctcggaaattcactggacttttcgaaagcagtgaatctgcaggatgcatttaagctggatggcaatacgttgaatttatccggacttgtgaatctggatcaggtggatctgaatctgtcggggcttccgccgacaggtctgggagatatgctgtcggggctggatgtcaaggtgaaaccgggcggaatgcagaagatggctgtttcattgatggaagggtatcaggcatatgcgaagacgcatccggaagcagattattcgcatctgggagataacttctttgaatatctgaaaacagatggtgcaaagcagatcatgaaaaagtatttttcaaagattctaaaggagagtggaaaagtaaccattacagaagaaaaggtacagaagcttctgacagatatcatgcaggggtttgaaaaatacgtaaaggatcagggaatcggagatatcagtgcggaccagtacggaacatatttccgccagtatttacagacggcagaagcaaagcagatcataacagactgggtgaatgacctgtataaagatgtggatattgagatatcggaagcggatctgcaggcaatggcgcaggaacttgcggctggatatttaagctatgcacaggaaaaaggatatgcagatgtgacaaagatgggtgagaactttgcagcttatctcggaacggcagatggaaaacagcggctgagtaacggtctttcagagacactggacatgaagagtctggaaagccagctttcatccgggatgaatgcttacatgaagcaggcaatgagagcgtatgcgaaatcttttggaaatgcacttgagacacagatttcgtcggccatggagcagatcgtcggacagatgtcttccggtatgggtaaagtaatggaatctgccatgacacagatcggacagaatctccagagtgtcatgacagatgcgatgaagatcgatacagatgcatttgcaaaggcatttcagttcaatatgacggaggatgatctgacagaacttatgatgtctatgagcggaacggcgagtgcaacgtatgacagcaatctgcagaaattaggatatgctgacttcgcaaaaccaagcgagatcgacatttatcctaaagattttgaaagtaaggaacaggtagtggattatctggatcgttataacaagaagatggagaaagccggcaaggatgaacaggtgatttcctacacggatgtagtgggaactctgatgtcatcggtgacagatatcgtcaatacgatcagttatgtgctgattgcctttgtggcgatttcactggtcgtatcttcaattatgatcggagtcattacgtatatcagtgtgctggagcggaagaaagagatcggaatcttaagggcaatcggcgcatcgaagaggaatgtatctcaggtgtttaatgcggagaccttcattattggactgtgtgcgggactgatcggaatcggactgacgctgttgcttctgctccctggcaatatgatcattcatgcggtggcagataattccaatgtaaatgcagtgcttccggttattccggcactggtgctgatcgcactgagtgtggtactgacattgcttggtggactgatcccgtcaaagaaagcatcgaagagcgatccggttacggcacttcggacggaataaatattatcaatgagctgcataaagcggtaaaacgtctgttgaaaaaatcatagagaaagattaaaatatgctatggagaaatctatagcatattttttataccaaaaagaaggagaccttatgtataattttaattattacacaccaaccaaagttgtatttggaaaaaatacagaagacaaatgtggagaactggtaaaagaacagggatgtaagaaagtaatgatccattacggaagcggaagcgtcaaacgtaccggattattggataaagtaaaggcttccctggatgaagcaaagattgactatatagaacttggtggtgcagtaccgaacccaagactttcactggtatatgaaggaatcgagctcgcgaaaaaagaaggagtagatttcatccttgctgtaggcggcggaagtgcgatcgattctgcaaaagcaatcggatatggagttgccaatgaaggggacgtatgggatttttatgacaaaaagcgccaggcaacaggatgtcttccgattggtgttgtactgactattgcagcgacaggaagtgagatgagtagttcttctgttattacaaaagaagacggctggatcaagagaggataccgcaatgactatggaagaccgcgctttgcaatcatgaatccggaactgaccatgacactgccggattatcagacagcatgcggatgcacggacattctgatgcatacgatggaacgctattttacaaatggtggaaatatggagatcacagacagtattgcagagggtctgatgcgtacggtaattgagaatgcaagaattctgatcaatgatccgaagaactatgatgcacgtgcggaagtaatgtgggcaggaagtctgtctcataacgggctgacaggctgtggcgcggttgtcggaggagatttcgcttcccatgcactggaacatgagatcggaggactgtttgacgtggcacacggtgcaggccttgcggcaatctggggttcctgggcaagatatgtatataaagactgccttcctaggttcgaaaaatttgcaatgaacgtcatgcaggtagacccggaaggaaccgcagacgatgtggcattacgtggaatcgaagccatagaagacttcttccgtgaactcaagatgccaacttctatccatgaacttggcattgatcctacagatgaagaactgaaactgatggcacataaatgcagcatcgggtgcaagggaagcaaaggatctgcgaaggtacttcatgaggaagatatgtacaagatatataaagcagcactgtaagaaggcttccgcgatttcatcttcatagcatgtgaaaacgtaactgaataaaagtatagcagtggttgctgtgcatatgcacagcaaccactgctatacttttattcaggccatcatgaagcagaaaatcaaaccttccgaacaactacttcctccgtcctgtgaattccttcttttaatgttgcttcaacatcctttacaacctgctcctcaccaaccggaatcaccagccctacagcggtaacaagtggaacaaacgcaacccatattccgtgagctccgaggtattctaccgcaaaatatccaaccagaacccccagatggaagagaatcagcgtgttcgtaaaaagcaatgcccgtttcttctgagccagatcatgtgtcatatgatatctggtccatgcaagaagtgtctgcttgtaattattcgttgaaaagatcgtggaactgttataacattccggagtggtaaaagcctgccactggtatgcattcaggatgaatacagggaacagtgcaatcaggggattgaccgatgtcggaatgatccctgcgatccatatgcagacggcctctaccgccagtgcgatataagattttacagaggcaaaatgttcgccgattaaaaatgcggcaatgatcgcaaggccatataaaataaaaatagccagacgaaggaaggcatccgtcaggttcatttccgtaaagtttaggaccatttcaattagattcatggtctgtgcggcaccaaaattgccgccacggactaagatggcataagcaccggtcagtccgccgataaatgcaagattgacatgcagtaatgcacgtttatgattatatatccaattcatttttctatcacccggtgcctattataggacggagagatggaaaaatcaaacaaaagtgtggaaaaaagagattggatggaaaataatacaaatatggattgacattttacaaaaaattgagtatcatagactttaatgaataaaagcgttaaagcgcgaaagctgttacgcaaaaaattcataaaaaagaattatgaatgaacacgaaaggggaattttccaatgccgattacagatatattggagaaaaactgccgcctgtacggagacgacgttgcgctggtagagattaatccggagatgccggagacaaaaagaactacatggaaggagtttgatctgatcgaaccttcacgcgcggcttattatagaagagagatcacatggaatgtatttaacgaaaaggcaaacagatttgccaatcttctgattgaaagaggaattaaaaaaggagaaaaagtggggattctcctgatgaactgtctggaatggttgccaatttatttcggaattctgaagaccggagcattggctgtaccactgaacttccgttattctgcggatgagattaaatattgcgtggaacttgcggagattgatattctggtgttcggaccggagttcatcggacgagtagaagagattgcagatgagatcagcaaaggacgtctgttatattttgtaggagacggatgtccgggatttgccgaggattataatgcacatacggcgaactgttccagtcagtctccgaagattgatgtcaatgatgacgatgaggcagcaatttatttctcatcaggaacaacaggattcccgaaggcaatcttacataaccatgaatccctgatgcatgcagcaaaagcagagcagaatcatcacggacagacgaaggatgatgtattcttatgtattccaccgttatatcataccggggccaagatgcactggttcggaagtcttctgacgggaggaaaagcagtattgttaaaaggaacaagtccgaagacaatcttacaggcagtatcggaagaacactgtactattgtatggctgttggttccgtgggcgcaggatcttctgcttgcactggacaataaggaactggatattgcagattatgatctggaccagtggagactgatgcatatcggtgcacagccggtaccaccaagcctgatcaaacactggaaagaatacttcccgcatcaccaatacgacacgaactatggtctgagcgaatccatcgggcctggatgtgtacatcttggcgtggataatatcgataaagtcggtgcgatcggtaaagccggatatggatgggaagctaagattatcgatgaacagggcgagacggtaaaacagggcgagaccggagaacttgcggtcaaaggaccaggcgtcatgacctgttactacagagatccgaaggcaacagcagaagttctgcatgacggatggctgtataccggagacatggcgatggaagacgaagacggatttatcttccttgttgaccgtaagaaagatgtcatcatcagtggtggtgagaatatctatccggtacagattgaagacttcttacgtaccaatgaagctattttggatgtggcggttattggacttgcagatcacagactgggagaaatttcagcagcaatcattgaactgaaaccgggagttgaatgtacagaagaagatattcaggaattctgtaagaaacttccgagatataagagacctcgtaagatcatctttgcagatgttccgcgtaatcctaccggaaagattgaaaaaccaaagcttcgcgaaaaatacggagcaacacatctggttgcggcacagaaccagggataataaaatatgtaaaaatgtcatctcttttgcaggaaaaatctgcagagagatggcatttttttacggacgtgtttataatagtggagaaataaataataagagcagactggagctgaatatagaatgaacaccaatgagaaaaaagagattacaatccggattgcaaaagaagaggatgcggaagaactgcttgcaatctatgcgccttatatagaacatacagtgattacatatgaatatgatgtgccgacggtggaagaattccgaggacggatccggcatgtattggagagatatccatatcttgtggcagaggtgaatggagaaatatgtggatatgcatatgcaagtgcttttcacgagagaccggcaggaggatggaatgtagagacgtctatctacgtggatcagaataaaaaaggaatgggtatcgggacaaaattatacgacatgctggagaagatattaaagcggcagaatgtgttaaatatgaatgcgtgtattgcatgtaccgagcatgaagatgaatacctgacgaatgcaagtatccattaccatgaacatttgggatatcgtatggtcggctggttcacaaattgtggatataaattccacagatggtacaatctggcatggatggaaaaagagattggagaacatgtggcagatcagccgccggtgatcgcgttcatggatatagtagaagatatttctttacagaacggagaactccgtttataatatgcatgttaaaataattgaaaatacaaggttctccgaagccttcatgcctaagatccataaaaattgtgatgatgggatgtcggccaggaatgacaggtctgtcagttcctcagggtagatagggaaacgtatctgcctcccgcgtatttggaaaggagagcagcacctttgtttaccaaagcacataggagaagctgtcaaagcattcgtaaaaaatgtcacaggcagattctcttatatttcgcctgctcttttttcggaaagagcaggtttttaatatatgaaaacagaatcagataagaaaaaatccgaaatcagtgccataatcctctgtggcgggaaaagtacccggatggggaaggataaagcaggacttctgattggaaagaagacatttttacaacagatcgaagaacatgtaagtggtgcggatgaggtgctgctttcggtaaaagaccggcgggattatccggagatagaggcaagacatatcgaagatctggaacaggacaaaggaccgttgatgggtctgtgctcggcgctgaaagaatgcagccatgaacgggtctgggtgatatcctgtgatatgccgctggttgactgggatgtggcgcaggaactggaagactatctgatagatgggattgatgcagtgatcccggtagacaagaccgggaaaaaatatgtgctctgtgcatggtacaggaaatctgtatggaagatattggaagaacagttaaagaccggggattataaagtgcagcatgtactggaaaatctgagggtatgttatgtggcagttcagggaattacagacggaccgggaaaattttataatataaatacaccagaagaatatcggaaaataataccagagaaaataaaagaaaaagcacagcagaccccggttgtatcgtttgtggcctattccggcaccggtaagacgacatttctggaaaaactgattccgaagctgaaagcatatgggcttaagattgcgatcgtaaagcatgacggacaccggtttgatatcgatcacgaaggcaaagacagtgaccgctttaccaaagccggagcagacgtgaccggtctgatctcctcggagaaagcggtgctgatggacaacagaacagttgatccggaagaattcctgaaaaagatagatggtgtggatctgattctgacagagggattcaagcacggaccgtggccgaagattatgctgcaccggaaagaaaacgggaaaccgatgccgttacgaccggaagaatgtctggcagtgatcagtgatgtggatgtggaggactgtgaaaatgtgttcccgttggacgatgttgggaaaacggcgttttttttacttcagtatatacagcagaatatgcaacatatagaaaatctatagtagagtatgaaacggaatgtgcctggatgacaggtacaagatgatagatacattgataagaattgaaacgagaaacgataaagaaacgaggcggaaaaagtatgaaactgatcagaacagaagatgcagtgggacatgtgttatgtcatgatatgacgcagatcattccgggagtgatcaaagatgcgagattccggaagggacatattgtcacagaagaagatattccggtgcttctttccatagggaaagaacatctgtatgtctgggagaagacagaaggcatgcttcatgaggatgaaggtgcggaacgtctgcgcaggatcacgcagaatgaaaatatgcatccgtcagttgtaaaagaaggcaaaattgaactgtttgcggatgtcgacggattattccaggtggatgtcgaacgattatatgatgtgaatagtgtggatgagatcatgatcgcaaccagacacacgaacacagcggtaaaaaaaggcgacaagctcgcaggaatgcgggtgattccgctgatcatagatgaaaagagactggaagaagcagaaaaaaaggcgggtccggaaccgttattgaaggtaacgccgtggaaattaaagacggcaggtgtgatcacaaccggaagtgaagtctataaaggactgatcaaagaccagtttactcctatagtggaaaagaagctggagacatttggaatccagatgacaaagcatgtattatgcagtgatgatacgaaaatgatcacggacgcaattgcagaaatgaaggaagcgggagtggatcttattatctgtacgggcgggatgagtgtagatccggatgataagacaccgggtgcaatcaaggcttccggagcggaaatcgtcacatatggggcaccgacactgccgggtgcgatgttgtgtctggcttactttgaagacgatacaccaatcgtgggactgccgggctgtgtgatgtatgcaaaagcaaccgtattcgatctgatcctgccgagaatggcagcagggattaagattgagcggagagatattatccggatgggacacggaggactctgtcttggttgtaaagagtgccattatccggtctgtccattcggaaaggaggcgtaaaggtggaaccatcccgagtgacacttgaagaggcacaggaattatttcaaatctgtatgcggggaataaaaaaagaagaaaaaccggcagcagactgtctgggacagattctggcagagccggtatatgcggcagtaacccagccgccgtttccaaggtcagcgatggatggatttgcactgagaagccgggacgtctgcggggcagatcttgagcatccggttaccttggaagttgccgggtgtgtgtatgcgggacaaaagacagagcttatactggaaccacatcaggcagtccggatcatgaccggagcaatgataccggaaggagcggactgtgtagtaaaacaggaagatacggattatgtaagaatagcagatccggatccggacaggaaaacaatcaaaatttataataatgtgggactgggagaaaattactgcccgaaaggagaagatttttctgccggggaattgctggcagaagccggacttttggtgaattcttatctgctggctgcagttacgtctgcgggagtacgggacattactgtatatagaagacttagggctgcagtgattacaaccggtgatgagctgcagaatgcagatacatcattagaacccgggaaaatctatgatgcaaatggaatctggctgtgtgcgagattaagagagatgggctgtgagatactacagtatgaaaccgcgggagatgacagggacaagatcacagacaagatcagtgaggtattaaaagaagcagatctgatcctgacaaccggaggggtatcagtaggagacaaggatctagttccggatgtcatagaaagcctgaacggcagggtactatttcacgggatacgggtaaaacccggaatgccgacaatgctttcggtagtagaggacatccctgttctgtcgctttccggtaatccatttgcagtggcggcattatttgaattattagccggtggatatctggcggacagggcagaagcggtatatacacagaagaaagagacaaaagtgctgagacagacatttgtaaagaccgggaagccaaaacggatcgtaaaaggaaaatgtgatgaggaaggcgtgttccttccgcagattcagagaaacggacagcttaagaatgggattggcagtaattgtttggtggtattcccggagggagaacggacctatccggaaggagaaaaagtccaggtgatccggatatgataaggaaggagtaatcatgggagaatttacgcatttcaatgaacaggggcatgcagtgatggtcgatgtcagtgaaaaagcagacacgatgcgtgaggcaacggcaatgggaagaatccacatgtcgaaggaatgttttgaaaaagtaaagacgggtggaatgaaaaagggagatgtcctgggaactgcaaggattgcaggaatcatgggggcgaagagaacatcagagctgatcccgttgtgccatatcctgaacctgagcaaggttacagtggaatttgaatatatagaggaaacctgtgagattgaagcacggtgtacgacgaagacggtcgggaagaccggtgtagagatggaagcacttaccggagttcaggtggcactgcttacgatttatgatatgtgtaaggcggtcgacaaaggcatgtgcatgaccggtatccgtttattgaagaaaacaggtggaaaaagcggcatatgggaagctgaccgggagacggagctatgattgatgcggcaggaagagtgattgattatatgcggatctccattacggaccgctgtaatttaagatgcagatattgtatgccggacggaatcacgcaggtgtccatggcggagatcctgacgtatgaagagatctggaaagtgtgcatacttgcagcagagcttggcattcagaagatcaagatcacaggcggggaaccgctggtgcggaaaggatgcgccgatctgattggaatgataaaaaatatttcgggaatcacacaggtcacgatgacgacgaatggcgttctgttacaagacaatctggaagcgttaaagaaggccggactggacgggatcaatatcagtctggatacgcttgatcgtgaaaaatatcaagagattaccggaaccgacgcctgtgaaacggtacggcaggcagtagcggccgccgcagaaagtgggatacggacaaaggtgaatacggtgctgcagtctgacggtgacaaaacggaatggaaggcattgatcacactggctgaaagcctgccggttgatgtaagatttatagaactcatgccaatcggttatggaaaggagaatacaggtgtgtcgaatctggaacttctggatgagatacggaaggtatatccagatatccgaagggacagtaagatacacggcaatggacctgcggtatattatcagattccaggattcaccggcggtatcggatttatcagtgcgatgcacggtaagttctgtaagaactgcaaccgcatccggctgacttcgaccggagacctgaagccgtgtctgtgttatggggatacctatccattgaaagatttactgcggaatggaacagaggaagagataagaaaacagataaaacgagccattgaacagaaaccggcagcgcactgctttgaagagccgggagcgattacggaagcacatcagatggcacagattggaggataaaagacaggatgaatcagaagaaaggcgtgatcagaggaatctgtatcagtccaagaagaggaactgccaagtatccggtagaaacggcaaagatcgtgccggactggggcattgaagaagatgcacatggcggaaaatggcacagacagatcagtcttcttgcactggagaagattgaagcattccgggaaaagggagcggatgtagattttggggcatttggagaaaatctgatcgtagagggatttgatttaagaaatgttccggttgattccgaaatacggatcggagatgcagtcaggctgaaagtcacacagattggaaaggaatgccacagccactgtgcgatctatcagcggatgggagactgtattatgccaagagaaggcattttcgcagaagtactgacaggtggaatgatccgtgtgggtgactgtgtggaagtcgtaatgccgcaggaagaccgcccatacagtgtagccgtgatcacgctgagtgacaaagcatttgccggagaacgagatgacctaagcggtccggcaatagaaaagatattaaaagacagtgaagaaaaagatcatatcagatttaacataaaagagaccattcttctgccggatggtgaagaaggattaaagaaacagctgatccgtctggcggatcagagacaggttgacctgatcctgacaacaggcgggacaggatttgccccaagagacatgacgccggaggccacgatcgctgtctgcgaccggatggcaaacggaattgcagatgtgatccgtagttattcgatgacgatcacagaccgtgcaatgttcagccgggcagtgtcgggaatgcggaagaagacactcattatcaatcttccggggagcccgaaagcagtgacggaagcactggagtatattcttccgaaacttcctcatggactggatgtcctgagaggaaatgtacaggaatgtggcaggaaataatcctattacagatacagtaactggtaaatttatcagataagagaaaaggagaaacgtattatgaagaaccagatggcaaaaaggatcgcatctgtcctcctggcaggagtgatgctagtttcactggtagcatgcggagaaaataaaaagacagaagaaaagaagacagatgacagcaaaaagagcagcaagaaagagacagagatccaggtattcatcgcagcaagcctgaacacggttatgacagagcttgcaaaagagtacaacgaagaacatccggaagtgaagatcacatttaacgcagacagctccggaacactgctgacacagatcgaagagggatatgagtgtgacctgttcttctctgcagcacagaagcagatggatcagcttgaagcagacggattggtagtagacggcacaagagcaaatgtcctgaataaccaggtggtagttatctccttaaaagacagcggcacaaaggtaacaggtcttgagaacttaaaagatgccaagagtatcgcacttgcaggcggaagtgttccggttggaaaatatacaagacaggcactggtaaatcttggaacattaaaggctgacggtgaagtagatgccattacaacagatcaagtatcacaggcacttggtggagtggaaattagtgaggaagataacgtaagtaaagtacttacagcagtagcagaaggatcctgtgaagttggaacaacatactattcagatacttatggatacgaagacaaactgaatatcctccaggttgtaagctatgatctgacaggcgatgttatctacccaatctgtcaggtacagaatgacgaagcagataagacacagactgcagccgcaaaagacttctacaaattcgtattatctgacaagactaagaaagtcttcgatgcatactatttcgacacagacgtagaaagataagaagcttcatagtatgaaagaaaatatgcaggcagttgtggctgcatgttttcggtttttcgaagtatgtaatagatgaaacaggaggaagttacatggatgcagtggtagaaatactgaaaggactggattacagtccactatatgtgtcgttaaagacgggaattgttgcaacgatattctcattctttcttggcctgtttgccgcaagaagagtaatcaaggcaggaccgaaagtgaaagcaattgcagatgggatcctgacactgccgatggtactgccgccgacggcagcaggattcttcctgcttcttctgttcagcagaagacgtccgtttggtatcctgctgtacgaacaatttggcatcaaagttgtacagacctgggctggctgtatcatagcagcgactgtgattgcatttccgctgatgtacagaaatgcaagagcggcattcgaacagatcgatgtgaatctgattcatgcggcaagaacacttggtatgccggaatataagatcttctggaaggttgcagtcccatccgcaggaccgggactggtagcgggtacgatcctgacatttgcaagagcgcttggagaatatggtgcaacatccatgcttgcgggcaatattccgggaaagacgggaaccatttcccagaggatcgcaatggttatccaggacggcaattatctgacggcgggcatctgggttgtgatcattatgctggttgcattcgtgctgatcgtccttatgaatctggtgaccggtcagaatacgaagaatatccggagatggtaggaggaacgacagatggcgatggaagtaaagatacataaaaaacttggagagtacgagctggatgtacactggaaatccacgaagaaaagaatcggaatcctcggtgcttccggaagcggaaagagtctgactctgaaaagcattgcaggaattgagcacccggaccaggggcatatccagattggcgatcatgtcctgtatgattctgattccagaatctgcttaaaaccacagaagagaaatgtcggatatatgttccagaactatgcattgttcccaacgatgaccgtggagcagaatgtcggagccggacttgccggtaacaaaaagaagaagcaggaacaggtacagaagatgatccgtcatttccgtctggagggactggaaaaaagacttccgagagagctttccggcgggcagcagcagagagttgcgctggcgaggatcatggcatacgaaccatccgttattcttctcgatgaaccattttcggcactggatgtcttcttaaaagaccgtctgcagcaggagatgatggaactcttaagcgattatgacggaacggtgatcctggtgtcccacagcagggatgagatctaccggttcagcgaggaacttctggtcattgatgacgggaaacagatctgttacggtgacacaaaggcaatctttgactgcccagaacaggtggaagcagcaaggcttaccggatgtaagaacattgttcaggtaaaaaggttggatgaacacagtatcgagatcccggactggggcacaaggcttcatctggaacaggagatcgatgcagagattacacatatcgggcttcgtgcacacgaattcatcccggtgtggggcgaaagagaagataactgcattccggttaaagaaaaaggaaaggcagaatttccatttgaatggaaatatttcttaaaaggtgagacagaagaaagtgatgatatctgctggtatgtacagaaaaatctatgggacgaacttacagaaaagggcattccggattatctgaaactgccggaaaaagagattcttttgctgaaataaaaatcatgatataatgagcgttagcggactggcgtatgctggttctctgacgcctattttttggaggaaaataatgtatacaatcgggacacatatgtccattgcgggaggaattgcgaagactgcggaaaatgtagtaaagatgaatgccaatacgatgcagatattcagcagaaacccgcgtggatccagttataaaacttatgcacaagaagaagtagagaaattccagcagatccgtaaaagccatgcattcggtccggttcttgcacatgcgccgtatacgatgaatctggcgagtgcgacggaaaagacatatgaatttgcctgtacggtgatccgggaagatatcagacgtatggacgaactgaagattgaaaacctggtattccatccgggcagtcataccgggatcggagaagaagccgggattaccaatattatccgtggacttgatcaggcgattacaggaacggagaatattaaggttctgttggaaacaatgagtggaaaagggacagagatcggataccgttttgaacagttaaagcagatccgagacggcgtacagcacccggagcggattggaatctgcctggatacttgtcacgtgtttgcggcgggatatgatattgtccatgatctggacggggtactggatgaatttgaccggatattgggacttgaattattaagaacgattcatctgaatgatagtctgatgcctttcggttccaggaaagaccggcatgcagtgatcggagaaggtgagattgggctggaggcacttctgaatgtgctgcgccatccgaagcttaaagatctgccattctatctggagacgccgcttgatgatgccgggcacaaagaagagattgccagattgaaagaatatctgggtgaggaataaggagcggagcagttgaaaaagttagaatatatagcaagaatccataccgactttccaacgaaatttggaattccaaggcagtcgggacttgtaagtacaaaaggaacaattgtattcgagccagaataccgcaaagaagaggcactaaaaggactggaagaatattcgcatctgtggctgatttgggaattttcagaggtggtcagggagaactggagtccgacggtacgtccgccgagacttggcgggaataagcggtgcggtgtattcgcaaccaggtcgccgttccggccgaatccgatcggattgtcctgtgtcaggctgcttgggatcgagaaacgtccggaaaaaggtatggttgttgaagtcgaaggagcagatttgatggatggaacgccgatactggatatcaagccatatctgccgtatgtggactgtatgccggatgccagaggcggattcgccgaccgggtgaagggttatgcgctggaggtagagataccggaggaacttctgttaaaacttccaaatgaacagcagggatgcgtgcgggagatcctcgcagaagatccgagaccgtcttatcagaatgatccggacagagtatatggaatggagtatgccgggtatgagattaagttccgggtaaaagactacaggctgacggtctgtgaaattgagcgggccgccgcggacagaacaataaaatgataatgatcaggaggatacaaaggtgaagtattatcttgcaccattagaaggaattacaacttatatatacaggagagcatatcatacacattaccgtccgatggagaaatatttcactccttttctggttccgcataccaaaaaggattttaatacgagagagaagaatgatattctgccggcacacaatccggggatgaacctggttccgcagatcctgacaaatgacgcaaagggatttctggatacggtagaaaagttaaaagggtatggatatgatgaggtgaacctgaatcttggctgtccgtccaagacggtagtatcgaaaggacgcggctcgggatttctgatccacacagaagaactgaaccggtttctggatgagatttatgcaaaagcagatgtgaagatatccataaagacaagaatcggaaaatttgatgcagatgagtggggagaacttttgaggatttataaccagtatccgttggaagagctgatcgtacatccgagagtacagcagcagttttataaaggacatccggatctggatgcatttgcggatgcagtgaaggaatgtaagcacacgttgtgttataacggtgatatttttacaacagaggatatggaaaaattaaagaagcggtttccagaggcctcctgtatcatgctggggcgcggaattttgagaaatccggaactgattgaaatcatggaatccggagaaaaaaagatcgatgcgaagaaattaagagcgttccatgatcagatctatcaggattaccaggaggtaagctgtggggataagaatgtgctgttcaagatgaaagaactctggtgttatcttgggacattgttcccggataaggaaaaacagctgaaaaagatccggaaagcagagaaactggatcgctatgaagcagttgtagaagaacttttaagtcacaattatattgacttaaagtaaatagatgctgaaataaaagagatcgcagacaaaatcaggaataaagttctgcagtctctttactttaaaaaaaatatgcaatataatagataaaaattctatatacaggaattttgcaaaagggagggacatgaattggatcgtttgaatgaattgatcgcagagaatctgaaagatatccgaaaaggaaaaggactgagtctggaacaggtgtcatcccttaccacaatcagcaaaagtatgttaagtcagctggaaagaggagaagtgaatcctacgatatcgacggtgtataagctggcactgggattgaaagtaccggtaacggcatttaccgcagataaaccgcagccgtttttcggaactggcaagaaagaagtagatcctttggtgggtgatgatggaagatatcgtctttatccgattttcagcttccgggaaggacaggattttgagatatttgacctggaatttgacgagggaggcatgatgcaggcgaaccgccagatgaatggtacgagagaattcattaccgtgtattccggagaactgacactgatctttaaagatcatgaatatgtgctgaaagccggagatgcggcttcgtataatgcttttgatgattatgtgtataaaaatacaggaaagggaatggtgactgccaatattgtagtacactattcgaattagaaaggagtaacagcatggaagaccagaaacagcgagtatatgatgcgttaaacaagatgggaattaagtacgaggtggtagaacacgagcccgtgcatacaatggaggatatggaccggctgggactcccggaaaaaggaacattgtgtaagaacttattcttaagagattcaaagggaaagagacatttcctgatcacagctgatgagaagacaaagttagatctgaaggcactgggaagacagcttggggcaggaacattaagctttgcttccgaagaacgtctggaaaaatatcttggtgtaaaacagggaagcgttacaccttttgccctgatgaacgatacggaacatgcggtggaattctttatcgataaaaacttaagcagatgtaaaagtatgggaattcatccactggaaaatacagcaacagtattcatatcctttaaggatctggataaattcttatggaatctggatgttgatgtagttaagattaaattgtaaaaagtttatagtttttttattgcatgtttcctcacgcagaagtagaatagaacagtatatgatacgaagcaacagatgaaagtgaggataattatggaagaatggcagaacggacacgaccagccaggataccattatcaccaggagcaggataaaaagcgaaagccaattgagacaccgggaaagcgtttctggaagatgtggggtccactcctgatcaaatggggaattggaatcggtgtaggcatggtagtcatggcggccatgatggtggcatatatgaagacgcattatcagacgcaggcggcattagaagcattgatgtctgatcagaataagctgatgggcttttatgagaagatgttgaataaatatattgattatacaacatgggtggaaggtctgtcagcgcttgttacgattcctgtgatggcaattttgtatcacggtgacagaaagaaagagaaaaaagcaggtatcataccggataaaaaagcacctttgtggaaatatccggcggtgcttattatggcacttgccatgagcctgggactgaataacctgatcatcatcgggaatctgtctgcggtagatgcaagctacaagacaacgatgaatgccatgtattcggcgccgcttgctatacagatcttatgtctggcagtactggttccgatttgtgaagaatatgtattcaggggactgttcttcagaagaatggaaaaggaaagttcgtttgtatatgcgatggtttattcatcagttgtatttggtgtattacatgtgaatctggtacagatgctttatggatttttactgggactgatgttggcatatgtatatgaaaaatacggttcgctgaaggcaccggcagcagcacatatggcgatgaacttgttgtctgtactggctaccagatacggactctataactggatgttgaaagataacatgcggatcggtgtgatcacggttgtatgtgcaatgatcgcatcaacaatgtttgttctgatccagcggattgaagaaaaaccggagctaaagactgaaaatgaaaatctgacgatgtaaattgtcagatttttttgcacaaaatataaagaagactaataatctgacaatttggggaaattttcctctttacaatagtaaaaccttgtgatatagtaggaaaaaacaaaagaaaggaacaggtgtatgaaagaaggaaatgtagtccagcatcatggactgtatcgttccgaattcgaacatgataactgtggaatcggtgcgatcgttaatatcaaaggacagaaaagtcacgatacagtggcaaacgcattgaaaatcgttgaaaatcttgaacatagagctggcaaggatgccgaaggtaagacaggtgatggagttggaatcttattacaagtttctcacagattcttctctaaagtctgtaaacctctcggcatctttttaggttctgaaagagattacggagtgggaatgttcttcttcccgcaggacgaattaaaaaagaatcaggcaaagaagatttttgaagtcatcgtcaaaaacgaaggaatgaatttccttggatggagagaagttccggtaaaggcagatgtacttggaagcagagcagttgaatgtatgccgtgcattatgcagggatttattgaaaggccaaagaaagtagaacagggtattgattttgaccgtaagctttacattgtaagacgtgtatttgagcagagtgcagatgatacatatgtggcatccctttccagccgtactatcgcttataaaggaatgttcctggtagatcagcttcgtctgttcttcccggatctgcaggatcctgattatgactctgcgatcgcactggttcattccagattcagtacgaacacgaatccaagctgggagagagcacatccgaaccgtttcattgtacataacggtgagatcaataccatccgtggcaacacggacaagatgcgtgccagagaagagaatatggaatctgagtgtatgaaaggaaaacttcacgaagtacttccggcggtcaataccagcggttccgattcagcaatgcttgacaatgcaattgagttcatggttatgagtggcatggatcttccgcttgcagtaatgatcgcaattccggaaccatgggcgaacaacagaaacctttcccagaaaaagaaagatttctatcagtattatgcaaccatgatggaaccatgggacggacctgcgtccattctgttcagtgacggtgactgcatgggagccgtacttgacagaaacggactgcgcccatccagatattatattacggatgacgatacactgatcctttcctcagaggttggtgttttagatattccaccggagaaaattgtagtaaaagaaagattgcatcctggcaagatgcttctggttgatatcaaaaaaggaaaagtcattgatgacgaagaactgaaagagacttacgcaagcagacagccatatggtgaatggctggacaacaatctgatcgagttaaaagatctgaagatcccgaatcagaaagttccttcttatacggcagaagaatgcagaagacttcagaaagcatttggatattcttatgaagaagtaaagacatccatcctgaatatggcgaagaatggtgcggaaggaacggctgctatgggtatcgatgcaccgcttgcggtattatcagatatgcatcagaatctgttcggatatttcaaacagcgttttgcacaggtaaccaaccctccaatcgatgccatccgtgagaagatcgttacatccacaacggtttatattggcgaagatggtaaccttttggaagaaaaagcagagaactgtaagatgttgaaggtcaacaacccgatccttacagagacagaccttctgaagattaaaaatatgaaagaagacggattcaaggttgcagagatcccgacaatctattataagaattcaagccttgaaaaagcaattgattatctgttcatcgaagttgacagagctatccgcgaaggggctaacatcctgatcctttcagatagaggagtggatgaatatcatgtggcaatgccgtcacttctggtactttccggattgcagcagcatctggtacgtacgaagaaacgtacgtctgtgggaattgttctggagacgggagaaccaagagaagtacatcattttgcgacactgatcggttatggtgcatgtgcgatcaacccgtatcttgcacatgaatccatcaaacagcttattgataccgatatgcttcagaaagactattatgcggcagttgatgattataacaatgcagtgctgggaggaattataaagattgcatccaagatgggtatttctacaatccagtcttatcagggagctaagatttttgaggcaatcggactgaaacaggaattcattgacaagtattttacggacacggtcagtcgtatcggcggcatcggaatcgaagaaattgcggcggattatatcgcacgccattctcaggcatttgacccgcttggactggaagttgatatgacactgaacagcgtcggacagcataagttaaagagtggtggagagagacatctctataatccacagacgatccatatgcttcaggaatctacaagacgtggtgattatgatatgttcaaacagtatacggatatggttaatgcagagggagaacatattaatatacgtggacagctggaattcaattatccgaagaaaggcattccgattgaagaagtagaaagtgtagatgagatcgtaaaacgcttcaagacaggggccatgtcttacggttctatttccaaagaagcacatgagacactggcaatcgcgatgaaccagttacatggtaaatccaacagtggtgaaggtggagaagaaattgaacgactggataccaaccgctgttccgcaatcaagcaggtcgcttccggacgattcggtgtaacttccagatatctggtaagtgcacaggaaatccagatcaagatggcacagggagcaaaaccaggagaaggcggacatctgccgggaggaaaggtatatccatggattgccaagacccgtcattctacaccgggagtcagtctgatctcgccaccgccacatcatgatatctattccatcgaggaccttgcacagctcatttatgactgcaagaatgcgaataaagatgcaaggattacggtgaaactggtatcagaagccggcgttggtaccgtagcagccggtgttgccaaagcaggagccggattgatactgatctccggatatgacggaggaaccggtgcggcaccaagaagttcgattcacaatgccggacttccatgggagcttggacttgccgagacacatcagacgctgatccagaatggtttgagagaaagagtccgcatcgagacagacggtaagctgatgagcggccgtgacgtggcgatcgcagccatccttggagcagaagaattcggatttgctaccgcaccgctggtaacaatgggatgtgtaatgatgcgtgtatgtaatctggatacctgcccggtcggagttgcaacacagaatccggaacttagaaagcgtttccgcggaaaaccggaatatgttgtgaacttcatgcgctttatcgcacaggaacttcgtgaatatatggcaaaattcggtgtccgtacactggatgaactggtaggaagaacagatcttctgaaggtgaaggatgtgccaacatcagaacgtgcatccacactgaatctggagcagattctggataatccttatgaaggcacaaagacaccgatgaccttcaatccgaagaaagtctttgactttgaacttgaaaagacactggatgaaaaagttctggtaaaagaacttcttcctgctgtagaaaagaaacagaagagaagcattgaaatagatgtaacaaatacaaaccgtacattcggaacgatctttggttcagagattacaagaagatatccggaaggtctggatgaagacagttatgtagtacattgtaaaggtgccggcggacagtcatttggtgcattcattccaaagggactgacactggaactcacaggtgacagtaatgactacttcggtaaaggattgtcaggtggtaaacttgtcgtatatccgccgaaaggaatccgttataaagccgaagagaatatcatcatcggtaacgttgcactctacggtgcgacaagtggtaaggtattcatcaacggtgtggcaggagaacgatttgcagtgcgtaactccggcgcaacagctgttgtggaaggtgtcggagatcacggatgtgaatatatgacaggcgggcgtgtagctgttcttggtggaacaggtaaaaacttcgcagccggcatgagcggcggtgtcgcttatgtactggatatggaaaatgatctctatacaagagtcaataaagagatggttcatatcgaacatgtgacaaccaagatggatgtcggagaattaaagagcatgatcgaagaacatgttgccaataccaattccgaacttggtaagaagatcctggataactttacagaataccttccaaaattcaagaagatcattccaatcgattatgagcggatgctgacaacgattcttcagatggaagaacagggcatgagcagtgaacaggcaaagacagaagcattttatgcgatcaaagaaggaagatagggggtaagaacagtgggaaaagcaacaggatttatggattatgacagacaggataagccggctgaagatccaaaagaacgaattaagcattttaaagagtttcatacacctctgtcaaaagaagaacaggaactgcagggagccagatgtatggcgtgcggtgtaccgttctgccagtccggtcagatgctgatgggaatggcaagtggctgcccgcttcataacctggtaccggagtggaatgatctgatctttcacgagaactgggaagaggcatattacagactgaaaaagacgaataactttccggaatttacatccagagtctgcccggcactttgtgaggcggcatgtacatgtggactgaacggagaggcagtttcaagtaaggcgaatgaatacagcattgttgaaaatgcatataaaaaaggttacgcaacggcaaaaccggtgaaagtaagaaccggaaagaaggtagcgattgtaggatcggggccatccggacttgcggcggccgatatgctgaacagaagaggtcacagtgtgacggtctttgaaagagaggataagatcggtggacttctccgttacggcatcccgaatatgaaactggaaaagcagttcattgaccggaagattgcgattatggaagaagaaggaatccggttcgtgatcggatgtaatatcggaaaagataagaaagcggctacattattaaaagaatttgatcgtgtggttctttgctgcggtgcatccaacccaagagatataaaagttccgggaagagaagccgaaggaatctattttgcagtggatttcctgaaatcaaccacaaaagcactctggaaaaatgcaaaacagaatgcagacggaacctatgatctaaacctgaaagacggtacatacatttccgcaaaagggaaaaatgttatggtcatcggtggcggagacaccggaaatgactgcgtgggaacatccatgagacacggagccaagagtgtgctgcagcttgagatgatgccgaaagctccggatgaacgtaccgagatgaacccttggccggaatggccgagagtctgcaagacggactacggacagcaggaagctgccgctgtcttcggacatgacccgagagtctaccagacaacggtaaaagaattcaaaaaagacaaaaaaggaaaagtttgcaaggcagttctggtaaaattagagcctaagaaaaatgaaaagacaggacgtatgatgatgacggaagtagccggaagtgaatatacagtagatgtagatcttgtattaatcgcagccggattccttggaagccaggactatgtcacgaaagcatttggtgtggaagtaaatgaacgtacgaatgtgaaaaccgcgccgggaaaatatgacacgaatgtgaaaaatgtattcacggcaggagatatgcacagaggacaatcgctggttgtatgggcaatccgtgagggccgtgaagcggcaagagaagtggatatcagtctgatgggatatacgaatatgtatgtgcagtaaacgattatgtgtctgaacagaactggaaaataagataaagatgaaaaattcttgaataatctgcgagtacaatttataataagaagaaacaggccggaagcatatgtttcggcctgttaaatgttacgaaattattaaaaaatgttgcaatttgtatttgtgtgcgctataatagggaacagatgtgagagattgttctcatgacgaggggaaaataattaaaacaaataagaaagaagagtgagtatgaataaacacggaatcagattgatcacagcagtggtgacaagttcaatgattgtaacaccggttctggcagcaccgtctgtcgatgatttgaagaaggaaaaagcagcaaaacagaatgaagtcagttcgttacagtcacagcttacaacattgatgggaaaggttaatacactggaaagtgaattgatccagacaggtgaggatattacaaaagcacagagtgatctggtagttgcgcagaagaaagaaaaagaacagtatgcagcaatgaagaagcgtattaaatatatgtacgaagccggtaatgattcagcgtttgaaacattggtcacatcggatgattttacagatctcttgagcaaagcagagtatgttcagaatgtacatagttatgacagaaaacagttacaggaatatgtagagacaaagcaacagatttcagatttgaaggacagccttgaaaaagatcagaaagaactggaaagcaagcaggttgaatatgagaagcagggtgataacctgaataacctgattacttctaaatcatcagaagttgctaatctggattcagagattcaggcagcagcagaagcagcagcaaaggaagcagcggagagagcggcaaaagaagcagcagaaaaggctgcaaaagaggctgcaaagaagcagcaggcatctgcagctaataacagtacttcatctaacagaaataattctacaacaagcaacaatacaacgagcaacaaaaataacacaagtaatacaacgagaccatcgagaccatcaggtaataatacaagcagtagtacaacaaagccgtcaggtaataatacaagcagcaatacaacaagcggatcgaatgcaaatggtggcacgatcgtaagcagagcatacagccagcttggaaaaccttatgtatggggtgcatgtggaccgagcagttttgactgttcaggattcgtaagctactgtctgacaggaagctatacacgtcttggtacaactcttacatttatgggatggacaagggtaagcaacccacagcctggtgatgttgtaacaacggcaactcactgtggtatttatatcggaaatggtcagatgatccatgctccacatacaggagatgttgtaaaagtcggaccagtacagtctggtatgatctatgtgcgtagataatgaaaagtaaataaaataaaaaaccggaatcaggtaactggtttcggttttttattttttatgctaaagtttgcagaaaaataaaaggaaaatccttgcaaacagacaacctttatggtaatattaaaaagtcgcaaaaaaatcacgcataggcttgtcccgatggtgccaaagcctggtaacaggacggtttcggggacgtataacaacatatgcggaagtaaaaaaccaatggaggaaagaaacatgagcgttatttcaatgaagcaacttttagaagcaggtgttcactttggacatcagacaagaagatggaaccctaagatggctccttatatctacacagagagaaatggtatctacatcatcgaccttcagaaatctgtaggtaaagtagatgaagcttaccaggcagtagctgatatcgctgcagaaggcggatcaatcctttttgtaggtactaagaaacaggctcaggatgctatcaaagtagaagctgaacgttgcggaatgtactatgtaaatgaaagatggcttggaggaatgcttacaaacttcaagacaatcaagagcagaatcgctcgtctgaaaaacatcgagagaatgtcagaagacggaacatttgatgtactgcctaagaaagaagttatccagttaaagaaagaatgggataaacttgagaagaaccttggcggaatcaaagacatgaagacacttccagacgctattttcgtagtagatcctaaaaaggaaagaatctgtgttcaggaagcacacacacttggaattccacttatcggtatcgctgatactaactgtgatccagaagaacttgattatgtaattcctggaaacgacgatgctatccgtgctgtaaaactgatcgtttctaagatggctgacgctgtagtagaagctaaccagggtgttgcaggcgaagaagagtatgttgaagaagctgaagaagcagcagtagaagaataagattcttaaaaaacataattggaggataagatcatggcagttacagctaagatggtaaaagaattaagagagatgactggtgcaggaatgatggactgcaagaaagctcttaatgaaacagatggtgatatggatgcagctatcgagttcttaagaaagaacggagaagctaaggctgttaaaaaagccggacgtatcgcagcagaaggtattgttatggctgatgttaaagaagacaagacagcagctatcgtagaagttaactcagagacagacttcgttgctaagaatgctgaattccagggattcgttaaagctgttgttaatcaggcaatcgcttctgaatcaacagatatggaaggattcatggctgaggcttggaacgaagatgcttctaagacagttcaggatgcattaaatgaaaaaatctctgtaatcggagaaaaactgagcattagaagatttgagaaaatcgttacagacggctgtgtagtagattacatccatggcggcggacgtatcggtgttctcgtagaggctgatacagatgttgttaacgacgagatcaaagcttgtctgaagaacgtagctatgcaggttgcagctatgtctccaaaatatacttcacgtgatgaagtagatgcttctttcttagagcatgaaaaagagattcttcttgctcaggctaaacaggagaatcctaacaaaccagataatatcatcgagaagatgatcatcggacgtctcaacaaagagatgaaagagatctgtctgttagaccaggtatacgttcaggacagcgaccttacagtagctaaatacgtagagaaggtagcaaaagagaatggagctaacatgacagttaagagattcgttcgtttcgagacaggtgaaggtcttgagaagaagaacgaagacttcgcagctgaagttgcagctcagatgaacgcataatcttacagttcgcataagaatatatcataatcagttgtgtttgtcaactgttattttattctttttttcaggagcaattcctgaagatttctgattaccattcagcattacctgctgttttccaatcagttagcgccgtcttctgcttcgactctgttacctcacggccttgtctaacgcgacagctagattaatataccacaacaggattcgaattgtcaacattgtttttatattttctgcaattaaaatatcgccagccatagcatggctgacgatacaaaaatttattattttttattgtcctcttgacggggagcataccacattttatatcttgtgtcgggggcttcttttactattcctcttccggataagtaaacttccatgactttctgaattccgtcatcatatccataacatcttttgtatactcaaaatgcatgcattcttcgtctcctgctatcgctttttccatatccgcaagttcataagcaagcgcatcggcattctccccggctcttacgacttctgtatcgccggtttctacgtatgtaattcttgcctcccatgctcttggatactccataatctcaatatatcccttttcacaggagatcattcctctcttcggctgtttggaatgaagcgacaacatgaccgttgccatctgtccttctgggttcatgagcagaagtcccgcctgttcatctaccccggtcggtgctgctttgacctgagacagtaactgatccggcttggaatccataaaccaacgaatgaatgaaagcgcatataccccgatgtccagcattgcaccaccggcaagattacggttaaagaagcggttattcatatcatattctttgaagcttccaaaattcatcgtgataagatttacttttcccaatacaccggtctccaaaagttcttttaattttttatagattggcatatgataaattgtcattgcttctccgatgatgacatgtttctcttctgccagtgctgccatctcattcaattcgtcactgttaagtgtgatcgacttttctaccagaatatgtttgccattctcaattgcctgtctcatgaatttcttatgtgtattatgaggagttgtgatatagataacatccacttccggatctgtaaacatctcattgtaatctgcatatactttaccgatgccatacttttcaccaaatgcaactgctttttcataggttctgttaccgacggcatatatattctttccattcttctttaatgcgacggccatctcatttgcgataactcctgtaccaagtactgcccagttaatatctttcatattttgattcctccatatatctgcttgttttttccattacatctttcaagatatccagattgtctctgacacttttggtctccagtgaatgatttgcaccttcgtatatgtgtatctttacattctgtttttccgaaaggtctgctactttctttacatcactccacggatcactgtttccgataaaagcaactgccgcttcatgtccaaatgcataggtctcttttaatggtgtatacaaaatatgccggcatggtatccgttgtgcctcagcatatgctgaagcaatgattgttccgatgcttttcgaaataaataaaatctgttcgtactggtcaaatgcaatttctttcagactgttctccgcctgtatatacaaagagtcaaatgcttgccgcatcttctcttcatttcctcttaggttctttccatcatatgtgtaattcaatgttacaatcttctcatacccatattcctgcaccagttttctggaataatacaataatggtttatcacaatgataacctattcccggaaaaaatactgccagtttcattcattctttcctccttattgtcgtctgaaaatatcataacatatattctcaaatctggtgaatataaaataaagagaaggaatagaatttcttctctttatttttactctttccagtatttattcaccttttacttttactgcagcttccggatcttccgctctgataacttccgccattttctttagcatttccatatccggtatttccacatctttcagctcgtagacccttcccaatcgttcatacgtctctaaccctagtctgtgatatggaagtaattcaatatctttgatgtgtttcaaattacttagaaactttattgtgtccttcatattgttttcgttcatattaactgtcgggatcaccggaatccggatatggatatcttcggcaaattctgcgtctaccttcaccagattttcttttattcttttattcgacactgcagccgtataacgattcctgttccgtccgggcaatgatctcatcctgtacatccttcccaagttccgtaaaatatgccgtataccctgccacacggatgagaagtcctctgtattcttccggtctttcctgtgcggcaagcaaggtctctctgtcgattacattaaaccgtacatggaaaattccaaggctgcacatactcttaagaagtgccatcatctgcatgataccattttcactgtttaacatctccggttcaatcttcatattcaggagggttccctgcacgaatctgtcatgcggcagatgtgatacggattttaatactgcacccggaccttcggtatctgttcttccattcggactcactccatccgctaacggcttccatgcatgtcttccggatggtaacgctcctacctccagaccgaatggtgtgttacctgataccggtaatattcccggtgtcatcgttcaaaatttacttctatagctttctatttcattcgaaataaacgtaaacatttctcctgctatctcattcgttgcttcattatcattcccgaacaccccacgatcaattcctgatcccagatctttaccgttttctctctgcattgtctgcggaacgcctttgcttttctgatacaaagcggctctccggctgtttctttaaagctttctgtcataatttttgcattttccagatccatctccggtcttgtattcactaccctgtctttgatgagccggatacgttccatgtatctttgttcacttttttctttcttatcatctttcatagtttctctccttttcttgtgcaaaacaaaattgattattaaaatcattacttttgcaataattttaacaatccattctccgtaaaaccatgaatttgttaacgtttcatatgaaaatcttaacattttccatattctccaggtgtaattccttcgtatttccggaaacactggataaaatagctggaatcactgaatccggccgcatatgctacttctgtcactgacatctccgtccccatcagaagctccttactcttctcttctctattcagtattccatcagatactaattcggtgttgtacgtaccatattctgaaagcatctgcaacattcacctacactgaccgatgccgcttctgcaatattcttcaggtgaatctcttccattttttatctgtcttatctcttaatctattctatatattttgtctatgctatgcattatgctccggctttccaggcttattgtagcatatcttttcttctttctgtatatactacttatatgctttcccacttgtctgctttatcacagtatattttttgcataaaatttccacaagaatttcattttatatgtcgtaaattgcatatttttccataatttctcattaatttgcaagagcccattgacgaaacgtcaaattctgttaaaatattataatatcgagtggtatatatgaagatggaggatggtatagtggtagcatatgaagaattatccaaagaagaattattgcaactgaagagtgaactggaagctcaattcgatgaagtgaaagctaagaatctgaagctggacatgtccagaggtaaaccgtctacagaacagctgaacctttccatggatatgatggatgtattaaaaagcgactctgatctggtatgtgaagaaggcgtcgactgccgtaactacggtgttctggatggtattgcagaagcaaaacagttgcttgcagatatgatggaagtaccgaaagacaatatcgttatcttcggtaactccagcctgaacgttatgtatgatacaatcgcacgcagtatgactcatggtgttatgggaagtactccatgggcaaagcttgataaagtaaaattcttatgtccggttcctggatatgacagacattttgcaattacagaatattttggaattgaaatgatcaatgttccaatgacaccaaccggcccggatatggatatggttgaagaactggtaagtacagatcctgcaatcaaaggtatctggtgtgttcctaaatattcgaatccgcagggtattacttattcggatgaaaccgttcatcgttttgcaaaactgaatcctgcagcagaagatttccgtatcttctgggataatgcctacggtattcatcatttatatgaagataaacaagactatctgattgagatcttaatggaatgcaagaaagaaggacatcctgatatggtttataagttctcttctacttccaagatcagtttccctggttccggtattgctgcaattgctgcatctgatgccaaccttgcagatatcagaaagcagatgcgtattcagacgatcggccacgacaaactgaaccagttaagacatgcaagatattttggaaatattcacggaatggttcagcatatgaagaaacatgcagacatccttcgtccaaaattcgacattgtcttaaagacactggataaagaactcggcggacttggaatcggttcatggctggctccgcgtggcggatatttcatctcttttgattctatggatggatgtgcaaaagcaatcgttgcaaaagctaaagaagccggacttatcatgactggtgcaggtgcaactttcccttacggaaaagatccaaaagacagtaatatccgtattgcaccgtcttatccaaccgtagaagaacttaaggtagccaccaaaatcttcgttttaagcgtaaaacttgtaagtattgataaattactgcaaagcaaataaaaataagctcaaatcgccatctaagacgcagcaggggcatgatcattacagatcatgccccatttttatatctctatatacatttattacgtcttatctttatcgaaccgactgattactattactccatatatttcttcttcagttcatcaactttagctctgtaagcttcttcctgttttttctgagacagttctgcacggatctggtcttttacttcttccagacttgattctcctgcttctttcttgtcctcaactttgatcaggtgatatccaaactgtgtctttaccggacctacaacatgtccaacctctgcagcaaatgcggcatcttcgaactcttttaccatctgtcctcttccgaattctccaaggtctcccccgtttgctcccgacggacatgtagaagattcttttgctacatcctcaaataccttttctccgcttgtgattgcattcagaagctctgtacatttctcttcattatctactaagatatgttttgcatgtacagatgcacccttcgaatatttcgatttatttgcttcataatattctttgatttcatcatctgttacgtttactgttgcaaaaagctttctcatagccatctgtgcaaggatatcttttcttgcattttccataacattcttgaattcttctgtctcgtcaattttctcttcttcgccgtattttgcaaatgcgtatactgcgatcagctgttcttcacactgcttacgaaaatccggatgagccgcatatgcctgctgttctcttggaaggctgtggatgaatgcctctacttctgcttctgtgatctgatgtccaccaactgtggcgattattttctgttccataatgtactccttttctattcaacaatggttcaattgtatcatctatactttctgtggtcaaaagatatttggtattttatatattttttattctttatacctttcatgcattaaacaaaaaaacaaccaacataccgttgattgcttcttatctttcatataccttcaaaactgcatacaagaaatattttctttcatcctacctatcaccttacttggtcatgccctcgacctaaaatatcgccagccatagcatggctgacgatacaaaaatttattattttttattgtcctcttgacgggaagcataccaaaaatagataaagtctacttaagggggacttttgatacaaaagtatacaaaagagagcattatttgttttcagaattacattccggcaaaccggtaatactggttagcagtgataatattccggccagcatggatgtggaaattactaatttcgtgtctatctgcccaagtacagttacggttccaattgttgctatggcggtctgcgcgacagtctttattgccctgataccggcacatttagcccattttttccaatcttttgctttcatgttaccatcctttcttttcagggttgattaagccgtttatcattagagcgattcgattattatccatacagttcagcaattcgtgatacgcctacgtaaatttcggaaattttataccatgtagtataatcgactgttccggtctgtggcagtccgaatactttctggaatgtacggactgattctgcagttgcaggtccgtaaatcccgtcagcagtaattttcggaatagcaggataagcacctgctatgacatttaattgttcctgcatctgcaaaaccttattgccggaagaaccaatttccagagtatagccaggccaggaggatgggatgccggagatggcttcggcggtgttaatgtacatgtcgtcaccgtagtagtaacggagaatttcgataggggaatagccctggtcgcctaaggatttggatccccattgggtcaaccaaattgtcataacctataaagtacccgcaaacccttgattttactgggtttgcgggtattttacctgtataggaaaaagtagattttaagagaatcgttcttgcgatcgtagataattttgtcaatgatctgcttcagagcttcgttcttttgcacgtatgtataattgttggagatgagaatatcgtacacactccggaccttctgcagcatagcatccgccggatcctgatcagatttatgcgctgcctttttcaattccttcaattgctgttctaaggattcccgttctttctgaatgatagctttattcgctttatattcttccagtgtatcaatcccttcccggtaggaggcttttattcgttcctctttgccggttaaactttccaattgttctgttatagccttgcgctcatcaaactgctctgtgggttgatattcacgcaattcatagacaatatctttggtatccaatatttctttgatactggccagaacttccttttcaaggaccagtgagctgatgccgttcggctttttacatttacctttactgtatccgtagcaggagaagtaagaatatttttccccattgactcgtttcatagtggttgaggttaaggtgcgtccgcaatccgggcatttcagtagtccggaaagccagtgcttataagtggaagagggacgcttgccaaccggcttgtaggtggctttaaatcgtttctgcgctgattcaaagagttcttttgatatgatagccggctgttgcccttctgtaacaatccattcgtccttatctttgatacgattggtgctgttctctgtccggttccaccggatcatgccacaataggaaggattctggatgatgtattcgacagatcttcgctcaaatggctttccgtgcgaagtcttgagtcctaaagaatttaggtatctggcgatatcaaagaagctcatgccttcatttgtgtatttttcgaatatagtccgaacaatctttgcttcttccggaacaatcaccggcggcttgccatgctccacaaccttgtagccaagcggcggacgtgcctggtatgctccacgaagtgcattttctttcatgcctctatatacttcgccggataatcgaatagagtagtattcgtccatccattcgataatacgctcgatcagtgaaccgaaaggattatcggagagtggttcagatacgctcacaacatctacattgtgctgtttttttaatagagatttataaacgatagattcttcctgattcctggcgaacctggaaaacttccataccaggatctgatcaaccggatgatcatcacctttggccagtccgatcatctcctgaaagccgggacgcttgttggcttttcttccggagatgcctaggtccgtgaagatctttaggattacgatattgttcttggctgcatagtcccggaggaggtgctcctgggagtccggggagatctcttcctgatcatgagtggatacccggatgtagccgtatgcatattttacgctcattgtatcaccttcctgtaattatatgtgcgacgtcgcacaaaaatgggtacaaaaataacacctatacggtgccggatttttgtgatacaataatctttgtgatggagagaattgtactgtgttccaaacaccctatagttttctcgttttccctggtgctggtaacaccggggattttttagtattttactgtaattctaataatttgtttgtaatgttgttggtgaactcgttttgctgtgtagctgttaatttggttgaggttcggattacgatagtacctaaaactttgtgagatccggaatttaacattcctgcaccatcaaagctggcaagatacgaatctctcttttctggaagatgaagaacagactatgtatgtaccagaggtggaaacggttgcgcttaataaagagacagaaacgcatcatgcgctggcagatggaactgtagaactgcttgatactgtaaaatataggaatctgctgccgggtagaaattacacattgcacggaatgatcgtagaaaaagaaacgggaaatccggtgagtgaagaaaggacattagaatttgttccggaaaaatcagaaggaagtgtagagcttggatttgaaatcagcgccgatgagctgtgcggaaaaacgatagttgtgtatgaagaaatcaaagcagacggtaagagcatagcagagcataaagacccggaagcgaaagaacaaagcatttatttcccggaaattggtacaaaagcgttggacgagaactcaaagacacaagaaggagaggcaaaggaaaagcaaaaaatcatagatcagataacttataagaatctgttgccagatgaaacctatgttttgaaaggtgttttgatggataaagaaaccggaaaagaattacttgatgaaaatggaaaaagagtgactgccgggatatcttttgttccagaaaatgaagaaggaacgattgaaatgacatttgaactggatgcacgcatgttggctggaaaatcagttgtagtattcgaaaggctttatgatgaagaagaacacttgatcgcaaaagaagaagatatcgaaaatgcagatcagactattttgtatagaaaacaggaaattccgaaaaatacaattgtagaaaagccggggcataattcaaaggaagttcgaaaatctccaaaaacaggtgatgaaaatcgtatggatttatggctggtaatgctgtgtgtgtttggaattgcagtggtaacagaaattgtaatttataaaagaagaaacagataaatattttattgctacctaaggatatgaacattttttgtctccgttggtgtgctattgccggaagtacaatataagtaacggtgcaagtagaggcgttgtagttcatatgaaagaaatcggtaataaagaatacaagaacatcaccaaagatactttgcttggaacagttggacagaacagaagactggaagcaatccggatcaccggaaaggaatctttctatctgtacagagtccaccagaagagtattggctggtcagaatgggccaacaacggagagtgggctggtacgaccggaaaaggactgcagatggaagcactggagattaagaaatccatgttctccgtcgaaccgcacgtacagagcaaaggatgggtggattacggcatgattaccaaagatacgattatcggaaccgtaggcgaaaagaaacgtatcgaatgcttatgctttgaaggtgactttgaatatcgtgttcatatccagaactccggatggacagactggacaagagccgatggagtagctactcttggaaccgtaggccaggaacttagaatcgaggctattcaatttagataattggatgggataaaactggcagcagtgaagagtgtgttctggtatgactatttttttacgtttattgactgctgccagttgctgtttttctttaggaaatttgtgaacggtcttgctgatatcagtgatataattcatatctacgtcatagaactgagccaacttaataagtgagtctacagggattcgtgttttgccaagttcataatcagcataggtgttctgtccaatattaagtaatcctgcaatacgggattgcgtataatcattatcttcacgtaatgcacgtatgcgttctttgtaatccatagaaattcacctcaaagatatttgtctaagaggaataaactctattgacgttagagttataaactcgacactgagagaataatcagtatgacaaattctctacctaaatcaaaagatcagttcgagtattggttgggagcgttgccgttttataataatgtaaaggcagaagggattgggctataaatggatatatgttataataaacataatatatagaaacggaaaataccaatatggatgaaaagaatgacttgataaaagttggaaaatatgatttgcgatataatgaattgttaagtattgatatagaagagttagacatatttaggtcaaaaggtttaccagcacatatggttaaaagaaaacattttaattgtttaaagtatattgattatcttccggagattatagaaaatccagattatgtaggtgttaatcctaatgaaaatgataaaagtattgagtttataaaaaagtattctaagaatgtattggttggagtaaagttggaaaaagatggtcaatatttatatgtttcttcgatgtatgatatccaaggttcaaagataagtagacgtttgtacagtggaagaataaaaaacgcaaatattgacaatgacgaaaatgaatagtatagtataaatgtaaacaacatacattgataataagcatagttatttttgaggtcggaaatggttcccgacgcactctgaaaagagtacctgagatgatggatacaccgcccatccaaaagtaattatgctttttatatttgactattaacgtgaataatagaagcacacttaagggagaaacgcctttaggtgtgcttttctttgtcctgctgccgttcgtgaatttctgatacactcttttcaagagaagctttattccattgctgacggacagtttcatgttctgactcaacaattcgccgactcagataatccattgacagatgatatggcaagggtattaagaaaagtaaaagagtttgaatttaagaatggctggttaggcgagtatgtttttcaagatgacaggggaagagtgtatgcttcaagaatatcagactgtgcagttaataacacaacaacagcagaattccataacaagaaaagtatccatgctatcagaagaacattgaattctaatatgaaatgtgccggtgtatctggaacagtagcagcgtctttgttgggtcatacggaaaaagtaaatgaagaaaattatacatacgatgtgagttccatggaagaaaagagcaaattcatggaatgtgctggaagagtataaaaaaagaaacatttacttcttacgaaaccatagtaacaaaaatagtaagaaaagtaaatgtctctaatcgctaaaccccttgattttactgggttttttgaatgcggatagtgggacttgaacccacacgaagtcacctccgcaagattttgagtcttgtgcgtctgccattccgccatatccgcatatatgttgcttacacaacaaaataaattataactataaatgtaatgtctgtcaatcccctttttctaaaaatgaaaagaaaccgtagaaagaaaatcagtgagaaaaattaaccttttaaaaaggcacaaattggtgtatagtaagatagtgattttataagaaatgaactatttaggtggagagacaaaatgagcagtaaaattgttctgattgacggccacagtattcttaaccgggctttttacgggctgccggatctgacgaatgccgagggccttcatacaaatgcaatatatggatttctaacgattatgtttaaacttctggaagaagaaaaaccagaatatctgacggtggcattcgatgttcacgccccgactttcagacacaagatgtatgcagaatataaaggaacaagaaagccgatggctgatgagttaaggcagcaggttccggtgatcaaagaagtgcttcacgcaatgggggttaagacgattgaatgtgccggcctggaagcagatgatctgattggaacattatccaatcgatgtgagaatgagggtatggaagttaccgttatttccggagaccgcgatctgctgcagcttgcgacagagcatgtaaaaatccgaattccgaagactaagcagggcaagacagaaattgaagattactacgctaaagatgttgaagaacgttatcaggtgacgccaaaagaatttattgatctgaaggcactgatgggagatacggcagataatattccaggagttccaagcatcggggagaagacagcgacaaagatcattacacagtatcattcgattgaagaagcgcatgaacatgtggatgagctgaaaccgccaagagcatccaaggctttaagtgaacactgggatcttgcggtgctcagtaaaaagctggcaacgatcaatgtaaaggctgatttcccgtatgaactattcgaagcaaagctcggtaatctatatacggaagaagcatatatcttttttcagaaactggaatttaaaaatcttctttccagattcgatgtttcggcaccggccaacaaggtcgaggacggatttaagatcattgcttccaaatcagaagcggagaaagtctttgtacaggcagaagaagcaagtacaataggcgccgtaatcttcaaagatctggaaaatgtattaccgttgtttgcagatcaggccggacttggaggtatcggactgtgcttttcaaaagaggaaagttattgtatcaaagttgaaaaagacataaccggagaatggttactgaaaaaacttgcggatgtggctgagaaggcagaaacgtatgcaatgttccatttaaaagagtctatggaacaggtaacaatccggaatcaggcaaactgctttgatattagtgtggctgcatatcttttgaatccacttaaaaataattatacatgggaagatgttgcaagagaacatctgggtctaatgattgatgaaaagatcgatcaggatatgaaagcctgctatgagtcttatgtaaattatgcgtcggtagaggttctgcggcagaaattacgggatacaaagatggatacgttgttccgagatattgagatgccgttggtattcacattgtttgatatggaacaaaatggaatccgtgtagaagcggatgctttgaaacagtatggcgatcaactcgcgggtaaaattgccgaactggaaaaagaaatttacgaagaagcaggtgagacatttaatattaattcaccaaagcagcttggagttgtactgtttgaaaatatgaagctcccgggtgggcgcaagacaaagacaggttattcgactgcggcagatgtactggaaaagcttgcaccggaacatccggtagtcgcaaagattctggaatatcgtcaatataccaaactcaagtccacatatgcagacgggctggcgaattatattcaggatgatgggcggattcatggaaaatttaaccagacgattacggcgaccggaagaatcagcagtaccgaaccgaatcttcagaatattccggtaaggatggaacttggacgtctgatccgtaaagtatttattccggaagaaggatatcgatttgtggatgccgattattcgcagattgaacttcgtgttctggcacattgctcaggagatgagcatctgatccaagcatacaaggaacagagtgatatccatcggattacggcatcacaggtatttcatataccgtttgatgaagtaactcctcagcagaggcgaaatgcaaaggctgtaaattttggtatcgtgtacggaatcagttcgttcggattaagccaggatttaagtattacacgtaaagaagctgcaaaatatattgatgattattttgcaacctatccgggaattaagacatttctggatcatgcagtaacgcatgccaaagaagaaggttatgtggtgacgctctttggaagacgcagaccggtaccagagctttcttccagcaacttcatgcagcgttcgttcggtgagcgtgtggcaatgaattcaccgattcagggagcagcagctgatatcatcaagattgcaatgatccgggtgaatcagagactgaaagaccagaagatgaaatcaagacttgtattacaggtacatgatgaacttttgatcgaggcgtatgagccggagctggatgaggttcagaatatcttgaaagaagaaatggaacatgcggcagaattaaaagtaccgcttgagatagatatgcatacaggagataactggtacgaagcaaaataagaggtgtgaaagatgaagattataggaattaccggaggagtaggcgcaggaaagacacagattctggaatatctgaataataagtatggtgcgactatttgtatgacggatgaagtaggaaagaaactacagaaaaaaggaacagaatgctttgatgaaattgtggctcatttcgggaatgaaatcctggatgaaaaaggtgaactggatcgtgcgaagctttctgacattgtatttgccgacagagttgaactttctgtgttaaatggaattgtacatccgagggtaaaagaagagattcagaaaaagatcacaagagaagaacgcaagaatacgaatctgatgctgatagaaggcgcacttctgatagaagatcattatgaggaaatttgtgatgaactctggtatgtgtatgtagaggattccatcagaagaaaacgtttaaaatacgcaagaggatatgaagacagcaaggtcgatcagatttttgaagcacagcttccgaaagatctgttcatgcgtcattgtgaccgggtgatcgataacagcggacagtttgaagagacaaagatccagctgaataagatcgtggaagatttataggaaaggcagatattatttagtatgagattatgcagcattgcgagtggaagcagtggaaattgtatttatgtaggagatgatcagacacatcttctggtcgatacaggaatcagcaagaaaagaatcgaagaaggattatcaaagttggagataaaaggggatgagctggagggaatactgatcacacacgaacatgtagatcatattcagggacttggtgtgttcagcagaaagtatgagattccaatctatgcaacgcccggaaccattgaaggaatcaggaattgtaaaagtctcggaaaacttccggaaggccttttacatgagatagagatagatcattcattttcacttggaacattgaatatagatccgtttgcaatttcccatgatgcaaatgaaccgtctggttacagaattgaaaatgaaaaaaaatctgttgcagttgcaacggatctcggggtatatgatgattataccgtagaacatctgagcgatctgaatgcggtcgttctggaagcaaaccatgacatacatatgttggaagtaggaccttacccatatccattgaaacgaagggtaatgggcgacaggggacatctttccaatgaactgtctggaaagcttctttgcgatatattacatgatgacctgcaatatgtagttctgggacatctgagtaaagagaacaattacgaagaactggcatacgaaacggtcaaactggagatcagtatcggtgacaatccttataaaggagatgatattccgatgatggtagccaaacgagatcaggtatctgatatcattacattataagaatgaagcaaaaatgtaagaaacgatgtgaagacaacaggaggaaaacaaatcatgaagaaatgtgtaattacagttgtaggaaaagacaccgtaggtattattgcaaaagtatgtgaatatcttgcaggaactaacattaatatccttgatatttcgcagaccatcgtggatggatactttaacatgatgatgattgttgatgtgacaaattgcagtaaagaagtagccgtagtttcaaaagaactggaagagatcggaacttctattggtgttactattcactgccagagagaagaaatatttgaaaaaatgcacagattataagtaaaatcactgaaaggcaggaaaaaacacatgataaacagatatgaagtatatgagacaaatcagatgattgctgaggaaaatctggatgtacgtacgatcactctcggaatcagcctgttggattgcatagatgcagaccttgataaattaaatgaaaatatttacaacaagatcactacggttgcaaaagatcttgtaaagaccggagaagagattgaacaggaattcggtattccgattgtaaacaaacgaatttctattacaccagtggcgctgattggcggtgctgcatgtaagagtccggaagactttgtgacaattgcaaagacattggacaaagcggcaaaagaagtcggagtgaattttatcggcggatattcggcactggtgtcaaagtctatgacaaagagtgatgagaatctgatccgttctgtaccacaggcactcgcatgtacggatcgaatctgcagttccatcaacgtaggttctacaaagacgggaatcaatatggatgcggtgcgtctgtgtggtgagattgttaaggaaacagcagaagcaacaaaagaaaatgattctctgggatgtgcaaaacttgtggtattctgtaatgcaccggatgataatccgtttatggcgggagcgttcctcggtgtgacagaaggagatgcagtgatcaatgtaggtgtcagtggaccgggagttgtaaaacatgcaattgaacaggtacgtggcaaaggttttgaagaattatgcgaaacaatcaaaaagactgcttttaaggtaactcgtgtgggacagcttgttgcgggagaggcatcgaagagacttggcattccgttcggaatcatcgatctgtcactggcaccgactccggcagtaggagacagtgtggctgagatcctggaagaaattggtctggagcgtgttggagcaccgggaacaacagcagcacttgctatgctgaatgatcaggtgaaaaaaggcggcgtcatggcttcatcttatgtaggcggcttaagtggtgcgttcattcctgtcagtgaagataaaggcatgatcgatgcagtagagatgggtgctcttacgatcgaaaaactcgaagcaatgacatgtgtatgttcggtaggacttgacatgattgcaattccaggtaagacaacagcttcaactatttcgggaattattgcagatgagatggcaatcggtatggtgaatcagaagacaacagctgtacgtctgatcccggttatcggaaaagatgtaggagagactgccgaatttggcggactgctgggatatgctccgatcattcctgttaacgaatatgattgtagtgcatttgtaaatagaaaaggaagaattccggctcctgtacatagtttcaaaaattaaaaataaatccatgtaatgtataataaaatgtgcggcgcatgatgaaataagttcagcttccattcgcaggaagaagatatttcgtcatacgccgcatgtttttgtatacaaaagtatgcaaagggaaacgtagaaaatatcatatgtcgaagtactatacacgtataatctgcttttgctgttcgcttgtgaacggtatgccgaatttatcggagataacactttcgtacaggtcggaagcaaaagaagtctggttcaacatacgtgaagcttccggtgacaaaagagatgctgatttgcctagtttggtaatgatcggtatggaagcatgatctttcatcgcgcgtaagacatcggtatgttctttccggaaaccaagaatacgcgcatatgaacaggaattgtcctggtatgcatgcatatcttctgtggttatggatagcagaatatgcagtaaacttctgctgatacggctgtaagtcagttcttttgtttttaaaagggtgcagaattgtccgaaagagcgaaactgattccggttccggatgattcggttggaaagctcttcagatacatcctggtatttgcaaagagattcatggggttcgctcagcaggcggtattttaacaacagtgaaaaatcatctgcttccacaggacaggaaaagttccattcattctgtataatagataaagaaccgggtggtaattgctcgcttagctgtgcggatatgttttttggcaggtacggggatgccggaatattcatcaagacttttcggattgcagaagcagaactggagcagtcatgaagttctgtgtcatgatatccggaaaattctctttttaaggtaaatggaacaatcggactgttcagttctttaagagctttcagatattcaattcccagtatattattgggatcagaaagaatctgtgaagcataggcatcgccagtcattttttcgagagcgtgacatcttgctgccggaaaagacatgccattttttaatgaactctggagatggtgacggtaggtttctggttcggcagacagaaggtgtgcaatggatgttaaatgttccagattaccacattcactcccaaaacaaagcgcatctatacagccaagaccgtctaagacagatactgcaccctttgcaaagaattctgcacttgcgcaggaataacagaccggaagttcaagcacaacagatgcaccgtttaaaagggccatatgtgcccttgaatgcttggaaagaacggcgggagttccacgttgcacatagtcgccgctcatgatgactataacccggtcggcaccggtcagttcttttgctttttctatatgataaagatgtccattgtgaaatggattgtattctgtgataagtccaacagttttcataagaatctccttgtataacattctggaattgattatactatacaatagtggggtacgcaaatgggatgtttacccagcaaaattcgaagaaaggaggatgcatattgttatggaagagaagatgaatgaggagcagtccctggaggacggacagcgagaagaagatgatattgattacgtagaagacagagaagaactgactgaagaacgtatcaaagacatgctggatgcgagagaatataaagaactgaaagaagaactggaaacaaatatgtatcctgtagaccttgcggagattctggaagagtttgatcagaagcatatggtgctggtattccgtttgcttgcaaaagaagaagctgcagagacattttcttatatggacagtgatacgcgagaggacctgatcaatgcactgacggattccgagcttgaagagatcatggaggaaatgtatctggatgataccgttgatgtgttggaagagatgcctgccaatgtagtagacagacttctgatggttacagatgaagaaaagcgtcaacagatcaatcaactgttacaatatccggaagacagtgccggaagcgtgatgaatgtagattatattgcgcttcgcagagaaatgacggttgcagaatcgattctgaagatccgccaggttgggctgaaccgtgagacaatctatacctgttatgttacagaacagcgccatctgatcggtcaggttgatgtaaaagaattgctgacaagcagtgaatccaagacaatagaagagatcatggataccaatatgctgtatgcacgtacaacagacgatcaggaagatgtggcaaataccattaccaagtatggactgatcgcactgccaatcgtggatcatgaaaattgcatggtgggtatcgtaacggttgatgatgccatgcaggtattacaggaggagacaacggaagatatcagtatcatggctggtgtcaatccgaatgaagattcgtatttcgggacatcgatatttgaacatgtaaagagtcgtattccgtggctgctgtttttgatgctgtctgcaaccgtaacacagatgatcatgaacagctatgaaaatgcactggcactgatgccgcagcttgcgggatttgttccgatgcttaccggaaccggtggaaactgtggatcacagagctcgacactggtgattcgtgggctggcagttggagagattgaattttctgatctgtttaaggtgatctggaaagagatccgaattgcattctgtatcagcattatcttatcggtagtgaatggaatccgaattatgctgatgggccagggagatgccaccatggcgtttaccattggacttactatggcatgtaccgtactgattgcgaaagtggttggatgtacattgccattggttgcgaaaaagattgggctggatccggcgatcatggcaacgcctttgatttctacattggttgatatcagtacgatcagtgtgtattttgcgatcgtaagtcacgtttttcaattataatgtcgtgaaaatgtaatatatcagaagcaaaatataacggatattgtacattgtacgcaaaaagagacataagattacaggaagaacccttgtccacaggggttctttgtattataatgaaaatactgagaaaaatatttggaaaggagtctatttatcatgggatttatagatgaaatcaaagcaaaagcaaaaagttgtaaaaaaacaatcgttcttccagagagcgaagacatcagaacttatgaggcagcagaggcaattttaaaagaaggaacagctaacctgatcctgatcggaagcgaagatcacggactccggttccgtccggtgtgtcatagtcatctccgaatacgccgagtttttcaagctttcctactgccacctgcgaaatatatggcatcagattattcggaattccctttggatcttctccgatacgtccgctttcatgcgctccgaccgggttgaaataacgaagcaggatgacattcatatccggatttgccttctgtacatctgtcatgatctgttccatcatagactttgtccatccataaggattcgtgcactgtcccttcggacactcctctgtgatcggcatctcttccggacttccgtatacagttgcagaagagctgaatacaatattcttaacaccggtctgtttcataacatccatcagcgtcagagttcctgttatattattacggtagtactctaatggcttctgtacggattctccgactgctttcagtgctgcacaatggataaccgcatctacgccttctttttccagcattgccttcaatgcagcttcatccattacatccccttcataaaatgtaatcgtctttccggtaagctcttctaccctttttaaggattctttagatgaattacaaagattgtcatatacaaccacttcatatccttcattcagaagttccagtgctgtgtgacttccgatataaccggctcctccggtaattaatattttcttggccacaatagtacctcctagttgttactatactttttcacgatttcgttcatagtataccacttttgttccatatcttcaacaagcttgaactgggtacggcatctgtcaagattatgaccttctctgtgtatcctgaaatatttatctccctgcagataatccgtaaggaaacgcataccacattcgaatgtcatcgtctttgcgcccatcggcatcagctcgatctccttagatgtcagctttccgccacatccttttaaaaatccttttgtatacaattcaaataattccatactgcaggatactttcgtaaggtctgtctcatcctccagtgccgtacttgcaccgaaacggatggaatccccaaaatcattcatcgcaagccccggcataactgtgtccagatcgatcacacagattcctttcccagtcttatcgtccagcataacattattcaattttgtatcattgtgtgtaacacgaagtggaagctcatgcctgtccagcatttctgcaaaacaattagcaatctcttctctttcgagaacgaaccggatctctttctctacagaagctgctcttcccataacatcttcttccactgctttcttaaacagcgcaaaccggtttctcgtatcatggaacttttctatcgtctcatgcagtgtctccgccggatagtcagacagcagactctggaaattcccgaatgccaccgcactttcataaaactgctccggcttctctaccagatcataggtacttgcatcgataataaatttataagatctccagtaatctcccgtagaatctatgtaatatggtttcccatcaaccgccgggatcacattcaatgtctcacgttccggatctccgccattttctataatcttctttttcagaaatgacgttactcctgtgatattctccatgacttctaccggttttggaaatgccgtagaattcattctctgaagaatgactttgattcttcccatctcggcaatctcgaatatcagaagaaatgtatcattgatgtgtccacttccgtatggacagtcctttactaatgttccttcatatttgaaatgtgcaatcgcttcatctctttgttcccgtgttacaggattcatttattttccctcccaaagatgctgcgggtacagtccttcgtctttcattctctgaatggctgcaaccacaaccggtttatcttctttataagttactccataccatttatctgcggatttcagtaccgatactgttgctttgtcttctgcgagaagattacttactacagttggcaggaaatactcgcatttcataggattctcctgcagtcctttgtcaagaaatgccgggaatccagctttgatctcttctaagatgctctttgtaaatccccacatattcatagataccgttgtatcatccggtacctgtacccatgtgttaccgtcgtcttctgtgtatgcaacaccgccgttgtacttttcgattctggtacgttctgttacggatatcaattctccattctcattcgtctcacatacacctctggatacatatccgttgtccgttaccgtattggcaagatgatatccgaccattgtatatctgtacttatcatcatctgcatgtgtagacagataatcatagatgagcttgaatgcttctactccataatagtcatctgcattgatcactgcgaacggtccgtcaatctcatccatacagctatatacagcatgtgctgttccccaaggttttacacgtccttccggtacttcatagccttccggaatgttgtcgatattctgataagcatatgctacgtccatgtatttttccatacgttttcccacatgctctttgaactcttcttcgatctcgtgtttgattatgaatacgaccttctcaaagccggctctctttgcatcatacatggaaaaatccatgataatatgtccgtcattgtctacaggatctaactgcttcagacctccgtatctgcttcccattcctgctgccatgatcactaatactggtttattcattataattacctccatgtctttaggatctttcgtttctagattcattgtagtataactatttccagaaatctttatcctattattttcttaatttgcattatttatgtggtttaattgttccagatagctgatgaatttttctgccattttctgattctgtgcattcaccataatagccgcatgcgcatcatcataagaaataatcttcttctttttaagcatattatcttccggaaaatcaatggtttcttgaaaaccatcctgttttttgtactcttgatatacatcttctctacagatcagtacatccactgcatctgcgcctaccagcgttgtcagcgctgtctttgaggacaggcttcctccatcttccggaatgttcgcctgtatccggatgatcccgtcctttttgtcaatgcctgcgtatttacagaaatctttgttcaattcttctgccttctgcgaatcgccccctgtgaccgctacattcagaagaactgtcgtatgtctgcccttgtacatcgtacagccaaggtagataacaccgattatcactgcaagtataaccagccatatcttatagtacatccacagatattctacctttttttccaacggcattgaaccaaaatttttgtccaaatatacttcctccttgtctttcatcactgttcttcattatatcatacttccgggcaaaaataagcggaagagaacagattcccattctctcccgctttcttttttattcatacgattaatattcaacttctaccggcattcccgtctctgctgattcaagaattgcgatgattgcaagtgcagttcttctggaatcttccaaagttactctgaattcttttccatctaccagacgatctacgaaatctctgatactttcataagacagacccttgcaacggtcaaataccatatttgataccagaatatccggcacagttgccttctcttctgttacttcctcgatcaggttgtggctggaaagatcaagactgatcattccttctgtacacatgacactgcatctgaagtcgttaatattacggtttccgtttggtgttacccatccgttttccatatgggctactacgccattttcaaattcaattgttgtaagatagatatccggtacatctacgccaagtccttttaagatgccttctttcttaaccgaatatactcgttttgcttctgatcctaccagccatcttaaggaatccagactatgacttccaaggaaccataagatagaagatttagaagcccatgaaagcatatctgttgcaacccatttcacatcgctgtgacggatatatgctgtatatggttttccgagttttcctgaagaaatctcctgttttgccgtattaaacggtggattccatcggttatgaaggtctaccatgcagcgtacaccatttttctctactgcctcacagattcttgcaatatcttcttttgttgttgccaacggtttttcgatcagaatatctttctttgcatctgccatagcgcaggcaatatcagcatgtgcaaaatcaggtgttacgattgcaactgcatcaatctcctcatcagctgccatatcatgataatctgtatatactttacggattccaaattcgtctgcaatctctcttgctctcgcttcattcatatcacagattgctaccggatctgcaaaaagatgttctgcatatattgacgcatgtgtgcgtccccatgtaccagctcctacaatacccattctgatctgtttaatttccataattgcatcctcctgttcacttttatcacattaaaaatattgctgttgtttattgttttaccgctccagcggtcataccacttaccagatgtttctgcagtaataagaacatgatcactaccggcaaggtgatcagcaccgctcccgccatcaatgttccccagttcgttgcatattgtcctgagaagcttgcaattccgattggcagcgtccaattttcataactcttcataaatgtgctggcaaataaatactcgttccatccattgatgaaggaaaagatacccgttgctaccaaacccggtactgtcaacggcaggattaccgttgcaaaaattctgaatcttcctgctccgtccactcttgctgcttcttcaagggagattggtatcgtatcgaaaaatcccttcatcatccatgtacaaaatggaatggagaatgtacagtaagctgctaccagaccaatctttgtatccagaagctgcagattccccataattacatataatggaatgatcaacagtgatcccggaagtacctgtgttgttaatataaaataagataaaaatcctcttccacgaaaacggaatcttgaaattccatagccgcctaatgtagcaatgatcatggaaaatgctgttgtcaacagtgatactattacactgtttcccaaccactgcataaagttaaatgttgtggaatgggttgtaagcatctctttgtatccctgcatagttgctgcctttgggataaaggacggtgtcttgctgtatacttctcctgccgttttaaatgatgtcgaaatcatccatacaaacgggaacagtgcgaacatacacacaataacaaccaaaattactgtaattacctttctacctgttctttttttcatatctattcctcctccttattcaggaccttgaaatagaagaatgtgaatgccagcgctacgaggagcatcagcataccagccgccgaagcctttccaaagtcaaagtatttaaatcctgtctgttgtatgtaaatggtcagaagttctgtcgcccttgatggacctccctttgtcagtacgtatgcgattgcataatccttgatcgtccagataatcaacagtaagaatactgttgttgataccgaacggattgccggaatcgtgatgtaacggattttctgaaatgttgtcgcaccgtcaatatctgccgcctcatacagatctgtagatacactctgcatgcctgccagcagcatgattgcaacatacggaaaacctttccatatgttaacaaccattgctgccggaagagcaaccgacacatcctgaagatatgcgatattatgtgacaaaattccggcattattcaacagaaaattaatgattccataatctttgtcatacattaagatccataccagacatgctacaacttccggaacagcccacggaatgatgatcagtgcccgtgccagaccacgtcccaaaaactttgtatttaataacaatgctgtaataaatccgataatatatcttcctgcaacagttactacgatatagatcagtgttacttttacggaattgaagaaatattcatcctgtaatacttttccgtaattttcaagtcccacaaaatagtgtccgtttggcgatggttttgttacgtaataatactgaaaactcatgattgctgcttttactaacgggataaccagaaacaggaataatatcagtaccagtggaacaaggaaggcatatggttccatttttcttttccaattaccatttttctttgtctgattcattgatggaccactccttacttaatcttttttacttgctattcagcatctctgctcataacttcttctacctgtttctgagccgaatccatttcttcctgtacatccgctgcctgctctgagaacatcttctgtgctgcatccagcatgatctgagaaatttctccaagctgcgagatgttagggtcagctacaagatctgtgtagttgttctgcatgaactcaacgatcttgtgctctaactcgtgattctgaatatattcatcacttgtagagtaatctgtgttacttgggatcataccgcagtcagcgatgatcttctgtgcttcatctgttgtcatccactcaaggaatgcataagcttcttttggatgtttgcaattcttgctgatcattgttacaagtggataatttgtcggattcggtttatatgttgttccgtcatatacaacgtcaaactgtggaatgattccgatatcatccattaaagactcatctctttctttgcacattcccacaaaccaaggaccgtccatgttgaatggaacatctccgttccagaacatttctctggagtctttcttatctgtaaccagttttgctgctttatccttcaagataaaatcctgccaccactgagctgcccatacattttcaggtgcattaatatttacattgtccgctgtatatggctctgactctccgttcgggaagtacagtccgtttgataccggtcttgcaatcagacgattccactcactgactgtgaatgcatgtgttccagatacaacgcccattgcatattttccatcgtctgtaaacttcttgcatgcttttctgaagtcttcctgtgtcttgatctcatccggatttacgcctgcatcttttaacatagatttgcgatagaagattccggttgttccccacgcataactggagattgccagtgtctgtccatctacatcacacatatcctgtccgaccagtttttctttcagatcgtcgctcatatattctgaaagatccatgaatgttccgccatcacggattgcattatatgtagaaatgttttctggatatacctggatcatatcactttcgttgtttgaaagaatctcagttgtgatattatcccaatatccatcataaccagctccaagaatttcaatttctacatttggttcttttttgctgtatgcttcaagcaatgcatcgattgctttttgatgtggttcttcaacatatacagatgttgagaatgtcagctttacttttccaccatcatcactgctttttttgtcatcgcccttgcttccacaggctgccagactagctatcattgccgcacaaagcataactgaaagaacttttcttctttttttcataacatctcctccttttgttatggtcgttttttgttgatttaattatataaaattcgatatttcactgacatgtaattaactcagttttttgtgtttttttatgagtattttacattttttctgaatattcttgatacttatttaacatactgatatttcacccatgtattcatcaactgtcttgatgttttattatatttataaatttgcttgctttttaatagatattgaatttatactttaagtaggatttttgtgcacaatattgtagatttttgtgaaagttggtgtacgcattatgtataaagcaattatcatcgatgatgaaccctggacaatcattgatatagaaaaaactttttctctggaagatatgggatttgaaattgtcagctcttatcggacaccgcagaaagcacttcctgccattatctctaagaagcctgacctggttattacagatatccgaatgcctggaatgacgggaatggaactcatcaaaagtgtccgtagtcagaagattaactgtgaattcattattgtcagtggtcacagtgacttttcttatgcacaggaggcaatttcttacggcgttgccggatattgtctgaagccactggatccacatgaaacctccgaagcactgaaccgtgccaagaatcatctcgacagccgaaagactattacaccggagccgtcctatcttgatgacaattttgaaggattgaggaactatataatcactcatttttcagaaaaactgacattaaaatctctggccgcagagtttaatatgaatccgaattattgctgctcactttttacaaaatatcttggccagacattttccgcttatcttacagaacttcggatcacggaagctcagaacctgcttcataattccgattattctctggaagagattgcctccctggttggttttaaagattacttttatttcagcaaagtatttaaaaaatactgcaaatattctccaaaagaatatcgtactcttccacattaaaaaacagccaatgacggctttaccgtttatttgaacaccaaaaagatatctgcgaggtttgatacttatgaaaaaatcgctttcccgccagtttattgcacttctgttaattccggtctgtattattctcgtaattaacttttgtatcattatccatctgcacaagagtcagaatgaggaattaaagaactattgtatctctacacttgaaaatattaatgtaaatgtctcttccatgaccaccagtatgaagaaaacagccactgtattttcatctcaaaaagaaacacaggcatatcttgaaagttcatcttctgattctcatcagctccagcggcagtcttactccgaactgattggcatggcgcagtcttacactccgggactgatagatatccttatgtgggatcagacttctgtaacaagtctgatcagctacattcctgctgatatggaagattttgttgtaaatcaatttcaagacagccggaatgatacagcctcttattttcatttttacatacagcccgcaaccgacaccccttacatgatgtattttgcaccgatatatcttacttcattttccgaaaactttggaaaatacgttggcaacatcgccatcatctgcaaaactgatgcattatataaactggtaaatgcatccacagatatttcactgacaatctctgaccggactaccaatcagatattgtattctaatgccgttgcccgaagacatatcccggcacggaataattttgaattcttcaaaaaaaccatggaactttccaatagtaatctggatatcactgccatcgcttataacggacagattcatcttttacagggtcaggaatctcaactcctgctctcacttgcgattctgcttcttgtatacatactgttagttattcttgctgtacaacacctgattatccatccgattcatcaactgaatgaaacgatcgaaaatcttgactataaaaataatgaactacaccttcagacaaatttaaaaaacgaaattggctccatcacttctcatgtgaaccatatgcttgacaggatttcttctctgaaccagcgtgacattgaatcacaggcgcgaatttacgagatggaactaaataaaaagcagacgcaaatttatgcatatcaaagccagatcaacccacattttctctataatatgttacaatgtatgcgtgggatttctctgatgcatgatattccggaagtcgcacaaatctgtacaaatatggcagatttgttccgctattctatcaaaggtgcttttcttgttcctttggaaaatgaattgaatatcatcgacaaatatctgtatatgatcgaagttcgttttcagggaaggatcacttataaactggaagtctctgagaatacaaaagactgcctgattccaaaaatgattctgcagccaattgtagaaaatgctattttccacggtctagatgagattgaggaaggcggcatcgtcatcataaagactaccagatcagaagatgatctgtatattactgtcacagataatggagtcggattttccaaagaaaaattgtacgatctgactcgaaaattggaagaggaaatcacatttattaacaattcatcttccgaaacctctgacaatatcggtgtgatcaatatccataataagataagactttatgaaggaaataattatggtctctccattaacagtatcccaaatcatacttctgtcactttgcatctgaatgcaaaacagcaaactacaacttagtattttttacttcccaggaggacatatgtcatgagtcgtttttttaatcctgataaccctattatggagttcatcgcaaaaatatttgatttgatcctattgaacctgatctttatcttcagttgtgttccgatcatcaccatcggtgcatccaccagcgcactttcctatgtgacactgaagatggtccgtggtgaggacccctacatctggcagaatttctggaaatcattccgtcagaattttaaacaaggtacattgatatgggtattttccattctggtctttatcttccttggaatggatttttacatcatcaattcacagaatacagtactgtttgcagtgatacgcattctcctctggtgtgtatgtctcgttgcattatctgtattcttatatgtctttccggtcatctcacattttgtgtgcagtacagcacaggcattaaaaaatgcagtttttatgacattcggacacctgccgtatacactggtaatgttggtgatcaccggactgatcctgtacttatgcgcctgctctgttaagacatttgctctggtcgttgtgatcagcggaatctgcggattctctgtagtagcatttatctacagtattctgtttgaccggatattcaaaaaatatgagccgaaatccccggacaatatagaataattgtgaaaactataagagactatcctgttacataacggatagtctctatttcatataaaaaagaggacaagacctgctatctcatcctcttataactattcatattctaacccttgattcctgactgtgccacaccttcaataaactgtttctggaagatgaagaacaatacaatgatcgggataaccgccattacggctcctgccatctgcattggatacttggttgtatactgtccctgtaatgtcgaaagagcaggaccaagtgtcatcttatccatagacgtattaacgatcaatggccacatgaaatcattccatgcaaatttcgctgtaaagattaccagcgatacgatacctgcttttgtaagtggaagcatgatccttccaaagatctggaaacggttacaaccgtccagcaacgccgcttcttccagttccttcggcaatgacataaagaactgtctcagaagaaatgttccaaatgcactgaataagtttggcaggaacaatgccggtatcgtgtccagaaggccaagactctgaacgatccggtactgcggaatcaggaatatctgacccggtaccataagtacggataacaccagtacaaaaatcgcattcttaaacgggaattcgattcttgcaaatgcataagctgccatagagcagaacaacacctgtacaacagttgttaccacagttgatataattgtgttcaaatatactcttccaaacggaagtgctgttacgatagatgaatacgcatctgtcagaaacttcttcgggaaaatggtcggcggtatctgcatggcctctccgactgtcttaaaagaagtcaggatcatccacacaaacggaaataccgtgatcgtaattccaaggagaagtaagatatgtacaattatttttcttgaatttttactcttcatttttcttctcctcctctcttaatcataatttacccattttttctgaccgatcatctggatcactgttaccagcatgattactgcaaagatcagaattgaaattgctgctgcatagcctttgtatccataatcaaatgcctgacggtagaataacataacaaccgtctgcgtatttgcatatgccggattcgtttttccgatcatcatataaatgacatcgaatacctggaatccactgatgatggatgtgatcatcacgaagaagatcgttggtgtcagaagaggaatcgttaccttaaaaaataactgaattggtcctgctccgtcaatctgtgctgcttcgtaataagattttgaaattccctgcatacctgcaagcaggatgatcatgttatatccgaccgacatccagagacctacgatcataacactatataatgcaattttcggatctgtcagccagccgataccttttccacccagtgcacggattgcactgtttaagatacccattttctcgttgtagatccatttccataccatggcaacagctgctgccatggttacggatggtaagaaatacaatgtacggtagatagaggtacctttaatcttggagttcagaagagctgcgatcaggattgataagaacaatccaaccggaaccgtaaccacaacgtacttcaatgtatttccgaatgtcttcaacacttcgccatcatggaataatttctggtaatttgccagaccgcaaaaagttgcgacattaaatttacttacttcgttaaaactaaaccagatattctggataaatggccagatatagaacaccagaaggccgagggtaaccggcgcaataaatatatacgccgcaatccaatccttcttctctctcttactcgcccgttttttcactacgcctgtttttgatttaccttcagccatatcttttcacctgtttcttactattattcctgaagtaacttatctgcctgttttgtcagactcttgcagacatctgaaagtgattcctctccattatatgctttctgaagttctgttgcttccagatcatacagttctgctgctttcgtacataccggaagtggatatgcttcatcagcgtgattggtataagctgcaagattgtactgtgaattagcttctgcaaagcatttctgtgcatctgttcttgcagagattacaacacctgtttttccctggatttcctgagcttctttacttccaagccagatagcgaaatcttctgctgcttctttgttcttgcttccttcaaacactgcatatccgagtccgttgatgcagttgtcttcttttccattgaatgtcggaatctctacgcaatcaaccttatctttgattgcgtcattgcttgcatactctggaaccatgtatgatccggcaaagttcattgcaagctgtccaccctcgaacatcgcatctgctgttgtctctgaaagagctgatgcacttggagataatccttcattgtacatatcgatccagcactgaataccttcctgtgtcttaggatcatcatatcctgtagacttcttatcatcacttaagatatatccgccatttgcatagacggtctgataataccatgtctggaaatcaaccgggcaggcaaacggatatacaccgtctccaagttttccgctgtcttttaatgccttagcagttgcaaccaggtcatcataactcatatcatctgtagggtatggaactccgcacttgtcaaagatttctttgttataccacattgcattagtatcaaaatctttcggcacagcatagttcttcttatcacggacatagttattaaccagtgtctcagaatagctgtccttgatatctgagtctttgatcttatctgtcagatcatccaggattcctccctctacatatgagtccagatgaagaacgttcagccagaatacatccggagcttttccaccacttgctgcagcttcaagttttgtccaatattccccacctttatatggtgttaactggatattgatcttgacatccgaattttctttttcatatgcctttaccattttctccatagctggtctctgattctcatcccagataccaaaatttaattctgtctttcctccggaagcactttcgcctttacttcctccacatgctgtcagcatcgttgcacccagggctacacaaagtcccagagctgctacttttctcatgttctttttcataatgttcactccttctcttattattacagggttacgttttatatgaagtcttctgcttctctgcaaaaaacacatatactatatcgttgtcatatttaccggaatgtatctatctcaactgcttttccgtcatgcagtctcgaatattcggctgccagtgcacaataatgactctgaagtgatctgtccagagatgttatgtatgtactctctgtcttttctccgcttataatatccagaaattcctcaaccatcttattgtctccaccgccgtgtcccgaaaaatcatccgataaagctgctacatcgattacttctttcgtccttcccggatcgaaatactcgattacgattttgctttccttttcatccggctgcatatctacgatcacttcacctctggttcccataaacttcgcatatctggaagtctccgctgtaaagccacacatggtaaagctcatcgttgttccatctgtcatattcagattaaccacctgatgatccactacattattgttacaatggaatacacattttccatatggacctgtcttcagtgcttctatcagcttttcttctgttggtccggatggaacaagcacatctaacggccaccctctgttaccttggcggtaaccgattctttcatgttccaggtatatcttttctgcatcaaagatgcatttttcttttgccttacagccttccaggcatctgcctgtacatccttccggtgcatgttccggtgtgaaataattcagatcgccataggatgttaatgatctgcaggtcttttccgccagccacagatataagtccatatcgtggcagcacttctgtaagatcatcgggcttgtctcatctgaatttgcccagttgcctctgacaaagctatgtgcctgatgaaaccatccgacattttcaatcgccatgatcgagatcacatcacctatcgttcctgcatccaggatttccttcaccttctgatagattggtgtatatcttagaacatgacagacaaccacttctcttttacattcttttgccacttcggatatttttctgcattcacccagatccggtgaaattggtttttcaagaagcagatgataccctttctttaaagcttttatagcctgacccacatgttgtctgtcctgtgttgctatgatcatcacatccgcaagtttttcctcctttaacatgtcttcggcgctttcataacagtgtgacatcgggacgtcatattcttctgccgtcagttttactttttccggatcaatatctgcaatggctacgattttcatcttatccggatatatttttgcagcttttgcataagtatctcttcctctgcttccgaggcctgcaattgcaactgtcatctgcttgctcataacttttatcccgccctttcttcatcctttgttacttctatattataagtctgtttttcaaagtctactgtaacctttgttccatctgcaaatgtagttctctgaacctgtggattaccatctaccatttcgtggcttaccatctcacattttgcgacctttttatgaaggtctgtgacaactttacatctcttaatgtcttcctcgatgtgcatctttacatttccatcaaaggaaccatcaaagttcggatatgcaccgtcacggatcaaataaggtgcgccgccatttaataatgcatacaacatataatcttctgtgtcatcaatcttttccatcatccatggttcgatcaggcagtcatgatataccagattgaataacggtaccggtacaccgtgttttgggcttcctggcttgcggagcatgaaatcatatggtgcatagtggcagaacacaaggcttcttgcgctccagtcgctgacttcctctgaacttggaagaattccttttgacatcagataatcaaagcatcttgctctgaagtcatagcagtctcttcttgtcatgcggtgtcttggattattacattcatcaccttcattgcaggtgaacacatccagataagcaccgtccagatggatctgattcttttcaatctcccggaaattacgttttacataatgtggtgcctgcgttgcgcacaggtaagactgctgcccgccagcccatctcttatgtgtcggtatggttccgtctgtaagtctgcatgcataatcttcatcaaagctttctgctgcgaaataataatcacggtactggtcatggataccgaacaggtctccctgcttttgcatcgtgtctgccagttctttcatatctttccagccgccggcttcttcgcaggccggtgtataatccggatgtttgttatcatatccaggctctgcccatccgtccaggtgaagatataattttccagctccgagttcatgaagctctttcatctcttttgttctgactgcaaatggtgtcaggttgttgttcttatctggattctccggatcaaaaaagtctgattccggctgaacgaatgtcttaattcctttatggatgaagctgcatccaatcagatcatctacagaagcaactcttgcagctttttcattcagcgtacataagttaccctgttctcttacataatctctgtagatcttacatgcatcgttgtaatctccatcttcgatcagtgtatatcttaccactctcttataatccatcctgccgagacttggctcgaatctcactcctacatgtgtatatggtccgttctccggatgctctgcctgatatcctgcattccatggtgttgtgcagattgcaatgtatccgttacgccccttaaactgtgagaaccatggcatataaccgccggctgtctcgaagaatccatcgaatggaattgctgtaagctctgtctcccagtcattcgggatcagcactccctgctgcatattcagcagtgtataccagtcatttttcttttcttctaactccatctctcccggccagaatactttttctaccgtaatcccttcttcacatatcggaacccactcaaagaaaatgtcttctgtagtttcctcaatccatgcataagtttcaaatgcatatggaactttagttccttctatctcaaatccggcaaatgaactgcggattccttttccgattccgttctgtaccagttcatgatgaatctccagtgcttcgtcaaaaaaaacggttccctctttacactccattttcggacggtaatccttcgtccagctccactctgtttcccctttacagaacgaaaaccttagatcactctcgtccattctaagttgtattgcgtttatctttatgtccaacatatgaaccacctctcattggcaaattcgccaattttcttgtttctttttgtttattatattgtattatgcacaacaatgcttagagtttcgtcctcgcttattgtcatatcgtccatatcctgttacaatataagctaggaggactgattatgacttatataaagaccaaattaaagcgttccatcgatatcgatgcgatcatcactttacactattttgaatatatgaaaaattttgaattcaaaggtgaatctcataacttctgggagtttctctatgttgacaaaggaaccgttgccgtccgtgctgatgacacctggactactctcaaaaccggagatatcatctttcaccaaccaaatgaattccatgcgatcaaatccatcggaaaagactctccgaatctggtagtcatgtcatttacctgtgattctcctgccatggatttctttatccgcaggaatttcaccctgagtatggaagaacgttccatgatatcgcagatcatcacagaagcccggcagacgttttccacgccaatgcatattccttctgtcgaacaggtagagttaaaagacaatacaccgtttgcttcacagcagatgatccttctctaccttgaattattcctgatcactttgatccgtgaacatcagcccaccgggaatgtgtcctctgcgatgcacaaatcttctccggaaaaagaatccacagaacatgaacggctcagtgaaattctgaaatttttggaatttcatatctgcgaaaaactgaccgtcagcgatatctgcgatacattttccatttccagatctgctcttcagtctctgtttcatgaacaacttgactgtggcgtgatcgaccattttaataaaatgaagattcaaaaagcgaaagatattatctgcgacggatccatgaatcttaccgagattgcatatttcctttcttacagctctcttccatatttttccaaacaattccggatcgccaccgggatgtcaccgtctgcctatgcctcttcagtcaaaggcattaccgatgccctgcggaacagcaaagaacgggaacgtgatacataaaaagtgacgcaatgaagtccggtattccgcaccccattgcgtcactttttttgtagagagttttttatagataatgttaccgcatcttaaaattctgcttttaagaatgcttcataacaccttacagcctcatatacatcagctttacttgttgtctcccatggtgcatgcatgcctaacacagccacaccactatcaatgacttccattccatatacactcatcagataagcgatcgttccaccgccgcctacgtcaacacggccaagctctgctgtctggaagttcacacctgcttcttccataatctgtctgagctgtgcaatatattccggattcgcgtcattggatccgctctttcctccggatcctgtatatttgttaaacaccggtccgcgtgccaggaatgctgcatttctcttttcatatacatcctcgtacattggatcaaatcctgcacttacatcggatgataacatctttgaatttgccagtgttcttctgagcacaatatcgttgtattcaacgccttcattcaaaagaacatattctgcaactgcattttcgaaaaaccgggatgtcataccacttgctcccgtactaccgatctcttccttgtctaccagcagacagcaggaagttcttgcaacctcttctgctcttaatattgcgaacagggatgtaaatgcacatactctgtcatcctgtccgtatgcaaggatcatgctgttatccagaccacagtctcttgcttttcccgcaggtacaatctccagttctgcggaaagaaaatcttcttcttcgacatcatatctttctttcagaagatttttaattcttcttgtaactgcattttcttccttgtcctccgggcggttgccgatcagaagatccatctgttccccatcgataaaatcttttgccagcttctccctctgtcttgctccaaggtgcggaagaagatcattgataaccagtacaggatctgtctctttttccccaacgcagacctctactttttctccattcttctttacgattacaccatgaagtgcaagtgggattgaaagccactgatatttcttaacaccgccatagtaatgtgtgtccagataagcaagtccctcattttcatacaacggattctgctttacatcaattctaggcgaatcaatatgtgctcccagaatattcattccttcctctaccggcgctgttcctgcctggaaaagtacaatggccttccccatataatccatatatactttatcccctgcatgaatctttgtgccggctttgatcagatctttcatattcctgtatccctctgcctctgcaagttcaatcgtctttttgacgcattcacgttccgtcttaccttcatccagacatgtacgatactgcgcattcacttcttccagctcccggatctgcgcttcactgtacgtctgccataagtttttacgttccatacctctcgtatcacctcatattcttttattatttatgttgtattatagaccaagtgtttcataaatgtattatgctttcgtccagtgaagttatacaattatccacctataccgataaatatttgtacaatctttattttccctttacttttcagacaactctgcgttatgatgatatcaaatatgatgcaaatatttgcaaaggagaatcattatggcatatcatggagtcgaactgcaaaattctatcaccatcgagaaaatattcagtatccattattttgaatatatgagtaatttcagttttgccggggaatctcataatttctgggaatttatctgtgtagacaaaggagaagtcggtgttacccgtggaaaatcttatactattttaaaaaagggagatctcattttccacaaaccgaatgaatttcatgatgtaaaagcaaccggtgggattgctcccaatctggtcgttatttcttttgaatgtaacgatgatgcaatgtacttttttaatgaccgtcttttacaaattgacgagacggaacgtaatcttcttgccaacatcatcatagaagcccgccgatgtttcgactgccgccttgacgatccttatcttcagaatatgccgctgaaagatccggacacgtttggcgcacagcagatgatcaagctttatctggaacattttctgattcatctgatccgacgctactctaatccgatcgtactttcaaaaaaacttccgaaggctgattctccgaaagttacgaaaagtaacagtgatgccgagatttttggccgtattgtggattatttggaaagtcatttgacaacacatgtaaccattgaccagatctgcaaggataatctgatcggacgttcccagctccagaagattttcaaagagcactgcagtcttggtattattgaatatttttctatgttgaagatcaatgctgccaaagaactaatccggaccaaccggatgaatttcactcagatcgcagaacaccttggatatacctccatccattatttttccagacaattcaaaaaagtggccggaatgactccttcggagtatgcatcttcgattaaggctatggcagagggggaattcaaataatttttcttggaatttaattgggatttaatttattaactggggaagcggcctctcagtccttgaaggaaacaatagataaggcttcttgttcaggttccataccataagaaacactaagagagtcatcactcagccaagtctgagtcatgctattgcatctcttgaaaaggaactaggggtaaaacttttcgagaaggagggccgtaatgtagcacttaccaaatgtggacaggcttttcttattgatgttgaacaggctttggatatgattgattccagcgttaacaagcttcagatgacaggtcgtggcgaaggtcgtatcgatatcgtggaacttcgtgctctaagcagtaccgttgttcccaatttcgtaaaaggatttctggattctacgccggataaaaaaattgatttttattttcatagttccacaggtcttacttctgatatgattcagggattaaaagaccggaaatatgacatcgcattttgctctatgatggacaatgagccgctgattgaattcacacctgtcgcaaagcaggaactggtgttgatcgtacccaaaggtcatccactggaaggacgcagctctattgatctgaaagatacacttgcttatccgcacattgcattttccaagcgaagcggcttaagacatgtcattgacaaattgtttaaaaaatgcggaggttatccgcaaattgcctactctatggaagaagaccagggagttgccggtcttgtcggtgcaggcttcggtatcgcagttgttccaaagatgccggttctttcctatatgcctgtatccattatcgaaatcgaaaagccttcctgggaaagactcttttatatggctactttaaagaatgtttatcaggcgcctgttatcatggactttaaaaaatacgtaaccgaacacgcagacctgtaaaaaataacagagacgaaagattgttaaaaaactttcgtctctgttatttttatatcatatctgcttaatctttttattattcccacggaagagctgtgtgttctgcttttccgacacgcagcatcagttcatttaccgcttctttcggactcttatcttcaaacagtaccttatttacttcctcaataatcggaagtgatacattgtatttctttccgagctttgccgctgcctttgcagaatatacgccttctaccaccatcttaacttcatccatggcttccttcatagttttaccctgtcccatcagatatccggctttgcggttacggctgtgtacacttgcacaggttacaataagatctccgatacctgccagaccgccaaatgtctcagccgcacctcccatctttacaccaagtcttgatatctcggcaattccacgggtaattaatgctgctttggtattatctccgtatcccatgccatccgcaactcctgccgcaagtgcaataacattcttaagcgatccaccaagctcaattcccagaatatccggactaatatatacacggaacacttcattcataaagagctgctgtaaatactttgcagtcgcctctgtatgtgctccaatgcagaccgtcgtgggaaggcctcttcctacttcctcggcatgacttggtccggaaaggaccgccacatctgcctgcggtatctcttcttcaatttgctgagacagagtcatcagcgtatcttcttctattccttttgctacatccactaagatctgtccatcttttacatatggattgatcttttttgcggtatttcttacatggattgacggtactgcaagtacaactacatccttttcttctactgcctcttttatatccgcggtaaagaatattccctctggaatctttactccaggaagcttactcacatgttctctcttctcactcagcatgcggacttcttcttcctgatatgaccagactgtcacatcatgtccgtttttatataaaagcagtgccagcgctgttccccagcttccggctccgatcacacttacttttgccataagagcctgtcctttcttttatcgtctctgactattttttatcttttcccccgacactgatcttattttccgtgccgcttaaaagtctctttatattcgctctgtgtctccagaatgccagtatcatcaaaaatgttgcaatcccatacatctcatgcagatacgctacattttccacatgaaatcctccgtgttgaccatatacaatcacactgatcagataaatcgtaacaactgtcatagatccaagtgatacatatcttgttgttgcgacgattgcaataaatgctgcaagacagatcagtacgatccatatatttgttgtactgatgataagtcctgccgttgccgcaattccctttccacctttgaacttcagataaaatggatagttatgtccaagaaccacgcccattcctgcatacatagaaagtaacggcatcatatccgtatgagtcttcccatagatcatgtgtacaaccactactgccgcaacacatttaaaacagtctcccagcagcgtaactcctccggctttccatcccatagtacggagtgcatttgttgttcccgcatttccgcttcctttttttcttaagtcaacaccattctttttcccgtatagatatccggtctgaatcagtccgaacacatatccgacaagcacacatatcaaccgttccatgattactgatccttttcctttctttccctgatgaagaatttcaaagctgtaccacggaatccaaaggcctcacgaatcttattctccagatatctggtataagaaaagtgcatcagttctttattatttacaaaaattacgaatgatggtggttttaccgctacctgtgtaatgtaatacagtttcaatctctttcctttatctgacggtggctgctgcatcgcaactgcttctgtcataatctcgttcaggacaccggtcgcaacacgcagtgtctgattctcgatcaccatatcgatcatatcatataatttgttcaaacgctgtcctgtctctgctgacacatacataatctctgcatatggcatgaatgaaagcacacgacgtacgttattctcatactctctcatggtcttgtcattcttttcaatggcatcccatttatttacaacaataatgataccttttcctctttcatgtgcgataccggcaatcttggcatcctgttcggtgacaccttctgtcgcatcgatcacgaccagtactacatctgcacgttctaccgccgttacagtacggatgatactgtaacgttccagttcttctttaattttgctctttcttcgaagtccggcagtatcaatgaagacataatcttttccgttatacttaacgtttgtatcaattgcatctctggtcgttccggctacgtcagatacgatcacacgctgctttcctgtcaacttgttaatgatagaagattttcctacgttcggttttcctacgattgccactctcggacgttcatcttctttttcttccgcttcatgttccgggaaatgtgcgatcactgcatctaacatatcaccgattcccagtctggaagcagccgataccggcaccggatcaccaattcccagattatagaattcatatacatccggcatgaacttatcaaaattgtcaactttattcacagccagtacaactggtttcccggatcttcgaagcatatccgcaaccttggaatctgcatctacaagcccctgtcttacatctgtgataaaaataatcacatctgcagtatcaatggcaatctgtgcctgttctctcatctgagaaaggataatgtccttgctctccggttcaataccccctgtgtcgatcatagtaaattctttatccagccatgtaacatcggcatagatacggtctcttgttactccaggcgtatctttgacgatcgaaatcatctctcccgccagtacattaaaaagggtcgacttaccgacatttggtcttcccacaatagcaactactggtttactcatcttaactctcctctatatttcattctatatttgtcacttaacgatactattatacattacctttgtcaaatagtccaatcagtagttgacctttttatagaaaaagtgatataaataattaggagtaacttatcatataaaatacacaggagtttttattatgccaaatatcaaattaatggaaagcggtcttcctgttgcaccacttaaaatcggtgctctggaatcatgccgcgaacttggtgaaaaagtaaatgattacattgtacaattcagaaaaagcacaatggacaagaacacagattcaccattatattataattacatgcgtgacaattacctgatcgattgtccgtgtccacgttttggaagtggagaagccaaaggacttctgacagaatctatccgtggggcagatcttttcctcatggtagatgtctgcaatcatagtcttacttattctgtaaatggtcatttaaatcatatgtcaccagacgaccattttcaggatttaaaaagaatcattgctgctgctaacggaaaagcacgccgtgtcaacgttgtaatgcctttcctctatgaaagccgtcagcacaagcgtaccaaacgtgagtctctggacagtgccctcgcacttcaggaactgatcgatatgggtgtatctaatatctttacatttgatgcccacgatccacgtgttcagaattccattccacttcacggatttgacagtttcaatcctccgtatcagttcatgaaagcattgttaaaagctgagccggatcttaaagtagacaaagaacacttaatgatcatcagtccggacgaaggagctatgcagcgtgctgtatacttctctaacgttttgggcgtgaatatgggtatgttctacaaacgtcgtgactattcaacggttgtaaatggtaaaaacccgatcgtcgctcacgaatttttaggtgaacatcttgatggaaaagatgcgatcatcattgatgatatgatttcttccggtgaaagtatgctcgatgttgcaaaacagattaaagaccgtggagcaaaccgcgtatttgtctgcactacattcggactttttacagacggattcgagaaattcgatgaatattatgaaaaaggatatatcgaccgtgtgattactaccaatcttacttatcttcctgccgaagcaaaggaaaaaccttatttcctgattgcagacatgagtaaattcattgcattgatcattgattctatgaatcatgacatcagtatcggaaaagttatggatccaactgagaagattcaccgtcttcttgagaaacacaacggtactttgtaaaaatacagagaacttgccaccggcgacttctcttgcatactgtgataacaaaagaacctgccattggcaggttcttttgtttaatttgtaaaatcactgtaagccgttccgtctttcagatcttgtttttttgccgcagccatttccgaaaccgttacaagctgataaccttcttcttcaagtttcgggataagttccagtgctgcgtcaatcgtctgactatgaatatcatgcatcagtacaatatccccatctttcagattcttcattacactgtcaatcgtgctctgcgtgttccttgtcttccagtccagtgtatctacattccagagaatcattggcatgcccacattcgactttaccgtatcattgattgcaccatacggaggtctgagcagcgttgccggacttccacaaatgttttttatattccggttcgtatcatcaacttctttttttactgccgcaccatcaatctttgtcagctgctggtgatcatatgaatgatttcccagttcatttccgtctttcagcatctgctttacagcatcaggatataatttcacattttttccaagcataaaaaatgtcgcatgcgcattatactttttcaactgattcagaagttctgacgttcttggacccggaccgtcatcaaaagtaagtgcgatcattggctttttcggatctattgctactttttctttcgaaatcagctcacccttttcgttgaatttgcatttctcaagtccgatctttacctctcccgttgctacaatccctttggaatcaaaataatattctttttcattgattgtctgccagccggtcagtgcttttccttcatctgtcagataagcctttccatcatctttggccacccagccggatctctgcataattcctttattatcaaagcaataaagtgcaccttctatcatctgccagccggttactttctttccatccgaatcaaaataatatgtatttccttttgataccacaaaatccgatgttatatatgttccatcgtattttttaaatttatttccttcccatacaccagtcggattctttaccttacatgttccgttctttattgtaacctgtaccttctttttccagtctccttccagattttttttaatattggaatttaatttcgcaatgatcacatacgttccttctgtattcgcatccgctttgcttaaaaatgtaatattctttccttttttcagatctttagcgaaatcttctgctgtataatcttttgttaatttgtttctatctttatcccggatctttatgtccgccgaataagccggaagctgttctccctgcttaatctctacatccgccacctgtatggttatctgcgccggttttcgcaggattcctcttactaccggtattgcaatcgcaactatacaaatagtaaaaagagcaagacccacccgaatgtttcttactcttctccgattccttcgtcttcttcgaatttctgtattatccatccctagtatccccccagatttcatatcattgcacaatcctaggatactctaattcgacatatttcgcaattaagggattcttacaaatttattaagttttgtttaacatatgacacgtacacgtaacacttcaccaatctgttttaattcctctacaacaccatccggcacctcagaatctacatcgatcatcgtatatgcatatttccccttactcttatttgtaaggtctgcgatgttcatattgtctttggcaaggatcgctgatatctgaccgatcatattcggcacattgtgatgtaataccagaatacgcgtcttatcgcctctcagtcccatatcacagtccggatagttcacggaatgtttgatattaccattttccagataatccatcacttctttgactgccatcttcgcacaattatcttcggactcttctgtagaagctccgagatgaggaattacaatcgcgcctttgacacctgcgatttccggtgtcgggaagtctgtgacataatgttttacttttccagctacaagtgcatctaccattgcctcggaatctaccagtacatcccttgcaaagttcagcacgatcactccttctttcataagacccagtgcatcttttccgatcatgcctttcgtactgtcaagtgccggtacatgcaccgtgatataatcacagttttcataaatttcatctacatttgttgtatgatggatacttcttgacagtctccatgcagaatctacggatacatacggatcatatccatatacatccataccaagatgtgttgccgcatttgcaaccagaactccaattgcaccaagaccgatcacaccaagctttttgccttccaactcctgtccggcaaatgctttcttggctttttctgcatctttggcaatgttcccgtcttcttcgttctcctgtacccagttgataccgccgatgatatctctggaagcaagaagcataccggcaattaccagttcctttacaccattcgcattggctcccggtgtgttaaatacaacgattccctgttctgcacatttctcaagcggaatattgttcacacccgcaccggctcttgcaatagctttcagatccggtgcaaattccatctcgtgcattgccgcacttcttaccaggatcgcatctgctgtttctggtgtgcttacaggtgcatagtcttttgtgaattcatccagtcctacctgtgaaattgggttcagattatgatacttatacatgattacagattctccttttcaaatgctttcataaattctaccagtttctctaccccttcgatcggcatcgcattgtagatacttgcacgcataccgccgacacttctgtgtcctttcaggttctcgaatccggctttttttgcctctttcacgaattttgcatccaggtccttatcacctgttacaaacggaacattcataagcgaacggtcttttggaacaaccgtgcccttgaacagtttgctttcatccagataatcatagagaatctttgctttcttttcattgcgctctttgattgcttccagtccgccctgttttttcagccatttaaacactttaccacagatatagattccatatgccggtggtgtattgtataaagacttggcatctgcatgcgtcttatacttcaacatagtcggtgtaccttctaatacatcatctgtgatcagatcctcacggataattgcgatcacaacacctgcaggtccgacatttttctgaacaccgccgtagataacgccgtattttgacacatctaccggttcagacaggaaacaggatgatacatctgccaccagtgtctttcctttggtattcggaagctctttgaacttcgtaccataaatcgtattattctcgcagatatatacataatctgcatcttcagagatatcgaggtctgagcagtccggaatataagaaaatgtcttatcttcggaagatgcgatcacatggacctctccgtatttttctgcttctttggctgcctttttcgcccactgtccggttacgatatagtcagccactttattcttcatcagattcataggaatcatggcaaattgctgagacgctccgccctgtaaaaataatactttatagttatccgggatatgcatcagttcacggatatcggcttctgctgtctcaataatctcctggaacaccgatgaacggtgactcatttccataaccgacattccacagccctgatagtctaacatctctgctgctgcttcttttaatacttcttccggcaatacggccgggcctgctgaaaaattgtacactctgctcattgttgttcctccactttcctttacttttttcttttactattctgcattttttgcttccaggtctttttcatcaaaagcttcattgatcggggcgccaggggcaaccatcggccataccttgtcatcactgtcaatctggcagtcgatcaccaccggatgtccgctctttaacgcgttcgcaaatgcttctttgaattcttcctgggttgccacacgtactccttctgctcccatagcttctgcaagttttacaaaatctacggcatcatttagtacagtagccgagtaacgctgtccgtagaacaggttctgccactggcggaccataccaagtacatggttgttaatcactacctggatcaccggaatattatggcgtgccgcggtagcgatctcattcatattcatacggaaacatccgtcacctgcaatattgacaacggtcttttccggtcttccgaccttggctccaagtgaagctccaagaccatatcccatggttccaagtcctcctgaggtaaggagtgttcttggctctgtatatttataatactgtgctgcccacatctggtgctgtccgacttctgtcgaaatgattgcttcaccatttgtctgacggtagatctcttctacaacaaacggtccactgagcacatccggatgataggtcatcggatatttctctttgtaagacatgatctgttctacccatgccttgtgatcctgctgttccagacgctcattcatcttctgaagaacgactttcagatcaccgaccacaccttctgtgatcagaatatttttattcatctctgcagcatctacatcaaactgtaagatttttgcattctgggcaaatttctttgcatttcctgttacacggtcactgaatcttgctcctgcgacaatcaaaagatcacattcactgactccgtagttggatgcctttgttccatgcattccgagcattccggtatataacggatctgttcccgggaatgctccttttcccatcagggaatcggtaaccggagcatctaccttctttacgaattcatataattctttgctggctcctgataataccgctccgccaccgacaaatatgtatggtttctctgactcccggatcatacgtactgcactttccagatctttttcacagatatcttcggatggttttacaacctttggttcctgtgctgtaaattctgctttgttcgcagttacatctttcgggatatcgatcaggaccggccccggtcttccttctttggctatcacgaatgccttacgtatcgtatccgccagattatcgacatcttttacaatatagttatgcttggtgattggcattgtaacacctgcaatatcgatctcctgaaaactgtcttttcccagaagtgatactcctacattacaggtaattgcaacgaccggaatcgaatccatgtatgcggttgcaattccggttacaaggtttgttgcacccggtccgctggttgcaagacatacaccgacttttcctgtcgctcttgcatatccgtctgccgcatgagcagcaccctgctcatgtgacgtaaggatatgtgtaatctcatctttatgcttatataattcatcatatacgttcaaaatcgctccgcccggataaccgaatacggtatcgacgccctgctctttcaaacactcaattacgatctgtgatcctgttaactgcataccattcattcccctgtcatgatttattttgcttttggaacttcgagaattgctcctctgtttccagaagtaaccattgccgcatatcttgcaagatatccggttgtaacttttggttctctcggagtccagtttgcttttctcttcgcaagttcttcatcggatacatccagatgaatagaaaggttcggaatatcgatctggatcaggtctccttcttctaccagtgcgatcggtccaccaacagctgcttccggagatacgtgtccgatagatgcccctctggatgcaccactgaaacgtccgtctgtgatcagcgctacacttgagccaagtcccatacctgcgattgcagatgtaggatttaacatctcacgcattccagggcctccctttggtccttcgtaacggataacgacaacgtcaccggcaacgatcttaccacctttgatcgctgcaattgcatcttcttcacagtcaaatactcttgcaggtccttcgtgtaccagcatctcgtctacaacagcggaacgttttacaacgcttccgtccggcgcaagatttccttttaatactgcaagcccgcctgttggtgtgtatggattatcaattggacgaattacttccggatctttgttgaccacaccttcgatattctctccaacggtctttcctgtaactgtcatacattctgtatgcagaaggcctttcttattcagctctgccataactgcatatacaccgccggcttcgttcagatcttccatgtatgtcgggcctgccggtgcaaggtggcagaggttcggtgtcttttcgctgattccatttgcaaaatcaatctcgaaatccattcctacttcgtgtgcgattgcagggaggtgaagcatactgttggtagagcatccaagtgccatgtcaaccgtaagtgcattcaggattgcttcttttgtcatgatatctcttggacggatattcttctcaagaagttccataaccttcatacctgcatgctttgcaagacggattctttctgaataaactgccggaattgttccatttccacgaagtcccatgccaagtacttctgtcagacagttcatactgttcgctgtgtacattccggaacatgatccgcatgtcggacatactttgttctcgaattcgcacagatctgcatctgacatcgttcctgcaacgtttgctcctactgcctcgaacatgctggaaagacttctcttctgtccttttacatgtcctgcaagcatcggtcctccgctgacgaatacagttggaacattgattcttgccgcagccatcagaagtcccggtacgttcttatcacaattcgggatcataacaagcgcatcaaactgatgtgccattgccattgcctctgtagaatctgcgatcaggtctctggttaccagagaatacttcattccgatatgtcccattgcgattccgtcacagactgctattgcagggaacatgatcggtgtaccgcctgccatggcaactccctgttttactgcatttgcgatcttatccagattcatatgtccaggtacgatctcattgtatgaacatacgataccgaccagtggtctgttcatctcttcctcggtaagtccgagtgcattgaacagcgagcggtgaggcgcctgctgttttccttttgttactgtatcacttctcattcttttttatcctcctgttgtctttctattcaatttcttctatataactctgtaaatccgtaattctatgcagcagacaattactgaatgtttgctgcgatcagacttcccatctcttctgtaccaatctgagtctttccgtccgacataatatcaatcgtacgacatccgtcttttaatacttttgaaacagctgcttcgatcgcatctgcttctttgtccagatcaaagctgaaacggagcatcattgctgctgaaaggatggttgcgattggattcgcgattccttttcctgcaatatccggtgcagatccaccacttggttcatacaagccgaattttgtctcatttaagctggcacttgcaagcattccgatcgatcctgtcaccatacttgcttcatctgaaagaatgtctccgaacatgttctctgtaaggataacgtcaaactgtttcggatcttttacaagctgcattgcacagttgtctaccaacatattttcaactgttacttccggataatcctttgaaacttcttctactacttttctccataatctggaagaatccagtacattcgctttatctacacttgtgactttcttacggcgtttcattgcaatatcaaatccgcgttttgcaattcgtctaatctcttcttcattatatgtaagagaatcctgtgctgtcattacaccatttacttcttctgtctttctctctccaaagtacagaccgccggtcagctctctcatgatcatcatgtcaaatccgccttctgtaatctcttctttcagcgggcatgcacctttcagttcatcataaagcactgcaggtcttaagtttgcgaaaagattcagcgcttttctgatctttaaaagtcctgcttccggtctcttggatggctctaacttgtaccatggagatgtctttgcatctcctccgatggaacccatcagaactgcatcacatgcttttgcctcggcgatcgtctcatctgtaagcggtactccgtgaacatcaatggatgctccccccatgagtaactgtgtataatcacaggtatgtccatatacttctgcaactttattcagaactttcattgcctccgttacaatctccgggccaattccgtctcccttaatcacaccaattttaagattcatagttcttcttccttccttcggtaaaaatctataaaaataatattatcgtatttttatgcatgtttcaagactttaattggctaaattgacaaattgctacattttacatactaaaaaagactttttatcatatttcttgtacactttgttgatttctatccactcgatacattcttgcaatctctttgataaccgaaagctttttacaattgcatgatacagagaacttgccactggcaacttctcttgcatactttggtataacaaaaaaattacggaacacatatttctatgtgctccgtaatttttattgccatgcattcgcaaggagctgccagtagcaggtcctgtaaataccaaagtatacaactgccagcggcagattctatgcatgatatttcgctgtttcaagaatccggttcgcattttccacacgctctttcgatggcggatcaatgccttccagctgatatgggattcccagttctttccatttatatacaccaagtgtatgatatggaagaacctcaactttctctacgttatcaagtgtttctataaagtcatgaagtctgtgcagatactcgtctttatcgcttctttccggaaccaggacgtgacggatccagactggttttccggtatcagaaagataccttgccatatcaagaatattcttattcgtctgtcctgtaaggatcttatgctgctcatcatcaatatgcttgatatctagcatcacaagatctgtcaccttcataagttcctggaatttactgaagaatggctcttctcttgtaaatggattcccgcaggtatccagtgtcgtgttgattcctctttctttggctttctggaacaactccagcagaaaatcgatctgcagaagcggttcgcctccactgacggtaataccgcccttacttccccagtaagtgcggtatttccaggctttatcaatcagttcatctgctgtgtagagagtccctgaattcatgttccatgtgtccgggttatgacagaactggcagcgcattgcacagccggtcgtaaatatcagataccggacacctggaccgtcaacggagccgaaactttccagagaatgaatatatcctttggtcatagttttgctccttttcttatttattacatgtactccgccatgcgcagctcgattccgctttgcttcatctcgctgacggctgtcgccgtatatcatctgatccagatatcataattcaagcaagcttgattataacatctgtctcatctgatgcatggctcatagcttttacatatgatcgtggcaagttcttgcgataacgtctaactgctgttcgcgagtcaggtcgatgaacttaactgcgtatccagatacacggattgtgaagttagcgtattctggtttctctgggtgttccatagcgtcaaccagtttgtctgtaccaaatacgttaacgttcaggtgatgtgctccctgatcgaagtatccgtccattacacgtgcaagattttctttacgctcgtcatctgtgtgtccaagtgcacttgggctgattgtctgagtattagaaataccatccagagccagctcgtatggcagcttagcaacagagttaagagatgcaagaagtccgctcttttctgcaccgtaagatgggttagcacctggtgaaagtggttctcctgcttttcttccatctggaagagatcctgtagccttaccatatactacgttagaagtaattgtaaggattgatgttgtaggtacagaatttctgtatgtgtggcacttgttcagtttgtgcatgaatgttttcagaagccagatagccatgtcatctgcacgatcatcatcgttaccgtatcttgggaagtctccttcgatttcgaaatctgttgtgattccgtcttcgtcacgaatagctttaaccttagcgtatttgatagcgcaaagtgaatctactacgtgagagaatccagcgatacctgttgcgaatgaacgcttaacatctgtgtcgatcagtgacatctgagctgcttcatagtagtatttgtcatgcatatagtggatcatgttaagtgtatcaacatacagtttgcttaaccattccatcatagcatcgtatttttccattacttcatcgaagtcaaggtactcagatgtgattggtctgtaagcaggtccaacctgaactttgttcttttcatcaataccaccgttgatagcgtataacagacacttagcaaggtttgcacgagctccgaagaactgcatctctttacctgtctctgtagcagatacgcagcagcagattgaatagtcatcgccccataccggacgcataacatcatcgttctcatactggattgagcttgtttcaaccgaaatcagagctgcgaacttcttgaagttctctggcagtcttgaagagtaaagtactgtaaggtttggttctggtgaaggtcccatgttcttcagtgtgtgaaggaaacgatagtcgttctttgttaccatagaacgtccgtcctgtccaagtccaccaacttccagtgttgcccatgtagggtctcctgagaacagttcgttgtatgatgggattcttgcgaacttaaccatacggaatttcattaccatgtggtcgattaattcctgagcttctttttctgtgatctttccagcttttaagtctctttcaatatagatatcaaggaatgtagagatacgtccaacactcattgcagctccgttctgagtcttgattgctgcaagatatccgaagtacagccactgtactgcttcgtgagcatctttagccggctgtgaaatgtcatagccatatacagctgccatttctttcatttctttcagagctttgatctgatctgcaagctcttcacgaagacggaagtctgttcccttcattccgtgtcttgcataacgctcaaagtcatactgttttttctcgatcaggaagtcgataccataaagagctacacgacggtagtcaccaacgatacgtcctcttccgtatgtatccggaagacctgtgatgatcttgttgtgtcttgctttcttcatttcaggtgtgtaaatatcaaatactccctggttgtgtgttttatgatattttgtaaagatcttatgaagttcttcgcttggctgataaccgtaagttgtacaagcctgctcagccatcttaattccaccgtatggcataaaagctctcttcagaggtttgtctgtctgaagaccaacaaccttctcaagatcctttgtctcttcactgatgtatcctgggccatatgctgtaagaccagatactacttcagtttccatatcaagaacgccgccctttgcacgctcttctttctgaagttcctgaagcttaccccataatgtatcggttgcttctgttggtccttccaggaaggattcgtctccttcgtatggtgtatagttctcctggataaagctgcgaacgtcaactgagttcacccattcttttcctttaaaaccagcccactgctcaaaatgtgccatctttttgttcccctttcctatctttcattttcttttgcgccgtcagtataccatttcgtgaagaaaatatcaaggcttattctgataatcgttttcaaaatcgcccttgtatgcaattttgtgcaatttgtgtatatttatacgaacaatatcgctttattttgcatttttccaggcacaattttaccttttgggcactaaaagatgtggaggaactgacgttggcattctgatccctcttacatatttttgtataaaaaagaagaacctgcacattatacagattctccattcttttgcattttattctgcagatgctttttcaacctgtgcgatggctgctttctgcattggaatacggcagttcttgttgcttccgaattctacgattacatcttcatcactgatgtcaatcagtacaccgtaaaatccgcttgttgtcagtactgtatctccgacttccatctcgttgatcattgcctgaactctcttctgttctttcttctgaggtctcatgaagatcatgtagaatcctccgaaaataactgcatatacaacaattaaaataacccagcttgtaccgctggagctctgtgctgctaatgaaaacatctcttttcctcctactcatctttaaacactattgctatcatacacaaaaacctcgcattcagcaaggttttttatgcttttttcattattttattcattcttgcccgttacagcggcaatttttctctctttatactctttataacagtcatgatcgatcgcatcacggatctcttccatcattgtattatagaaatacagattatgaagcacacacagacgcattcccagcatttcttttgcttttaacagatgtctgatatatgctcttgaataattgcggcatgccgggcactggcatccttcttcaatcggtctgtcatccagctcaaatttggcattgaacagattaagttttccatgattcgtgtacacatgtccatgtcttccatttctgcttgggtacacacagtcaaagaaatctacgcctctgtcaactgcttccagaatattcaccggagttccgactcccatcagataagtcggtttatgatctggaagatggggaacaactgcatccaggatccggtacatctcttcatgagattcaccgactgccagtccgccaaccgcatatccatccagattcagttttgaaatctcatccgcatgtttgatgcggatatcttcatatactccgccctgattgattccaaaaagcatctgatgcttattaattgtatccggaagcgaattcaggcgttccatttcttttttacatcgtacaagccatctggtcgtacgcgccacagatttttctatatattccctgtcagctacactcgacgggcactcatcaaatgccatcgctatcgtagatgccagattcgactgaatccgcatactctcttctggccccataaatattttatgtccgtcaatatgggaattgaaatacactccctcttctttgattctgcgcagtcccgcaagtgaaaacacctgaaatccgcccgaatcggtaagaatcggcttgtcccaattcataaatttgtgaagtccgcccaatttttttaccacttcgtctcccggacgcacatgtaaatgataagtatttgataattctacctgcgtctttatctcctgcaaatccgtagttgccacagcccctttaattgcagctgccgtaccgacattcataaacacgggggtctcgatgaccccatgtaccgtatgcagccgtcctctttttgcaaggccgtcttttttgattaattcatacatgattatatttcctttttctctaattatgtactaccaccggtgttcctgccgaaataagttcgaataattttccggccatctcaggcggcatgtttacacatccatgtgatccatttgtctgatacctgctgcctccaaatgtaggctgccatgatgcatcatggaaaccgacacctccgttaaacggcatccagtattttacaggcgtctcatactcataagtaccatctgcctttttcgttcccttaagcgtctgatcttttgctttatatgcaagcgaatagacaccggtcggagttgcatttcctttatttggatttcccgttacaacatctgtctccagagcaatatgcccatcttttacataatacatatgctgtgttgtcagattaacctctgcgtaagtatttcccacatcatttccatcatggcttgctgcacggcttgaataattgggctctcttgttactgtttccgctttttgaatattcgcgatcagcgcattgtactctgcttcctgatcaatcttccatccgtaacttccacccgaaaccgtaacggtattaccgcttgctgatgtaaatgttctttcttttccctttgtatcatactttgctgcaagtgactgaacgtattctttcacagcactttcatcgaatgtcacattcatatcatcgtcaactttaacccacttagatatcatagaagaatcgacaacctctgtattcggtttgaaatcataggtaaccgttgctccaagatatttgttcattgcatcacaggcttctgttacctttttggaatctgatgtgtaagccggcttttcatagcagcctgtttttaaaagatcaagcttttcatttgccccgttcactgcggttattactgtcttacggaactcttcagtcttgatcgttgtaccatccgtctccggtacaaccacaaatttgtccgtcttgaattccggatgtgcattaaccggtgcaatctgattctcttctttcatacattccagatttgcaatctgcgtttttaatgcgctttcatcatactctaccccgatctttgccttcatattgcggcctttccataacgactcgatccacaggaacggattctgtccttttatcagtttttctacctgttttccgggtacatactttaatgatatgtcttttccttcaattacttctgttttattatcggcttcaagtaatgtcagtttataatctgcaacttctttctccagatattcctctacctgttttacattcttattcgaacagtctattccattaatgacagtctttgaaaagaaatgtgtactgtaaaatactgccgtacccacataaccaattgcaatgaccgaaacgatcagcgaaagtacaattgctatcttattacgcaatttccagttttttcttctgttttttctttgttgtcttctttcttgtttcattactttctgtgtttcaggtctctgatcctcttcatcaatttctgaaaatccctcatccgcatacatttctttctctaatatttcttccattttatctgtatgtttttctctaatactcattaattctaactcctctacaatgaaatttacctgcttataataaagttcatgctttctaattataatatgcatatatagaaaagtacagataaaatccaaatttttcacaagatattttataaataatttatgattgcggcttcgatgctttttttatataatatattttatataataacacaatcttttatgaccgaatacatacgaactaaggagacacagatatggcaggatcaacttttggaactttattcaggatcacaacctggggtgaatcccatggaccggctctcggagtcgtcgtagacggatgtcccgccgggattcctctcaccactgattatatacaggcatttcttgaccgcagaaaacctggtcaaagtaaattcactactgcccgcagagaatcggatacagtcgagattctttccggcgtttttgaagggtatacgaccggaacacctatttctctcgtagtccgtaataacgatcagcgttctcatgattacagcaacatcaaagactgctatcgtccggggcatgccgattatacatttgataaaaaatacggattacgtgactatcgcggcggcggacgtacttccggaagagaaactattggacgcgtttccggcggagctgtcgcttcccgcattcttgaatgtcttggaataaaacttactacctataccaaagcaatcggtcctgtatccattccttccgatgcctatgattattctgtaattaatgaaaaccgcctttatatgccaaattcggaatacgcacagcaggcagctgcctatttggaacaatgtatttctgatcaggattcgtccggcggtctgattgaatgtattattgaaggtatgcccgcaggtgtcggggagcccgtttttgacaaactggatgcttccctcgccaaagccgttatgtcaatcggggctgtcaaaggtgtagaaatcggtgatggattctctgttacatcttccaaaggaagtatcaacaatgattctttcatctccgaaaacggacaagttttgaagcagaccaaccatagtggggggattctcggcggtatcagcgatggaagttccattatattacgcgcagccatcaaaccgacaccatctatttcccaaccacaaaaaacagtaaacactgccggagaaaacatcgaaattgctatttctggacgacatgatccggttatcgttccacgtgcggttgttgtagtggaatccatggctgcaattacacttacagatctcctgatgcagaatatgacttcgcgtattgaatatctcaaaaatatttatctttaataggtgactgcttcttccgaacgcatgttgatacatagaacttgtcaccggcaacttctcttgcatactttgttataccaaaaaatgcaaaagaagctgacgatgacaggttcttttgcatttatactttatacattatacatggaaacatccgccaccgataaactcccttaaaagtgaatttgccggcacattctcgcttccgatccctacaaaataatccaggaactttaacaagcgtttcgcttccagatattccggacactctctttcaattccaaaaagctgtgcttctacatatggtttcaatactgccagttcataaatcaatgcagaattgaacatcacatccgcttcctcctgatatgggaatatattacactcctcaccttttcgtacagacggccacatacggatagtttcttttgcagaagttcctctcgttctcgcatctcggacaattctgcggatcagacgcccatctgttgtcggaatccgattatgttcatcaatattcagctgcgtgagtgcactgatatatattttaaacttgttctcatccggaagatttctggttaattccggattcaggcaatgaattccttctattacaagcacttcattttcctttaactttttcggtctgcccttatattctttgtgtcccgtgacaaaattaaattctggtattaccacttcttttccatcaagaagttcctgaagctgacgattaaacagttctacatctaccgctcccagcccctcaaagtcataattgccattctcatctttcggagtctcttcacgttctttaaaataattgtccactgcaattggatacgggcacagtccattcgccctgagctgtacagacaaacgatgagaaaacgttgtcttactggaggaagacggccccgcgatcagtacaaaccgaacatccgaacgtactctgacctgttccgcaatctgcgctattttttcttcctgaagcgcttcctgtaccagtaccagttcattcacatcacttctggtaattttatcgttcaaatcacctaccgtttctattccctgagcatctccccatttcgttgattcctgtaacacatgaaacagctggttctgtggttcaaacggaggtactttttccggctcaccctgggtcggcatctgaattacaaacccttcatcatacaaatataatttgaaatattttaaatatccggcactcggaaccatatatccataataataatcttcaaattcattcatactgtaaatattcacacgtgatacccttcgataatgaaacaatcgttctttgtcatgcatcccatgctctccaaacattgcaatcgcatcgtctgtatgcacactttttttctgaatcggcagattcttttctaccattgtcctcatccgtctctctaccttatccagaaactcttgtgtgagttctatattgccttctatcgtacaataataccctttacttacagaataatgaatacggactttatcgatattcttatgttctgccacatcatataccgcttttacaagcatcaggctcatacttctgcgatacgctttatatccaagcgaatctgcagtcgtcacaaactcaagtttacagtctttttttaatgttttaaataattcctgtaaccttccatcaacaaatactaatactatatcgtgctcatattcatgctgatattcttttgcaatatccagatatgttgttccttcccgaaactttctgtcacagtcccctacctgaactgtataaaaaacttcattcatacctgcacctcatttcttctctccgggttatgtatggaatcagacgatcaggaacggatgactgatcggtgccgcaacaatctcaacctcactgagatgtttttcaagatactgtctcatatcttcaataaagatatgttcaatcccataatgtccgccatcgatgattgccagtccctgggctaccgcatcaattccttcatgatgtccgatatctcctgtgatcagaacatccgcattcttatccagtgccgcctgaatcacacttttaccggaacccggacagattgctattctttttactttttcttccagattaccgaatacctttactgcccccagatgaaatgcagacttcacatcttcacagcattctctgagagtcatcggtgtctcaagatcagatactcttccgatcccttcgggttcatcttctttccctatatccccttctgcagttacttccagaatttctgcattcttcatattcatcttatccccggaaaggtctgccattcccagtacatcataattcgtatgcatagcataataagaaatatcgttctgtatcagttttaagatacgttctccgacaaaatccagattatgaattctcttaatcggtgaaaatatcatcggatgatgtgtaatcaacatatctgctcctgtcctgacagcttcatctattacttcatctgtggcatctaatgcaatataaatcctttttacttccttatcatctcttcccaccagaagtcctacattgtcccacgacagcgcataattaagcggatattctttctcaatctcatacattacatctttacacaacatcttacatactccctttcttctactcgtaatactttaaagcctcttgtgtcagtatgatttcctgtttcagttcttccattctctcggcagcacttgcactgttctgatgtttaaaaagttgttgaaatacactctctttaatctgcatctctctgtccagatattttttcaggacaggatgctgttccaaaagcagacgtttgccatatgtatattcacatattgtatattcttcttttttcccgtgtatgactttcatcattggataaaattttccatcttcctcaaccatattttcctcggtaatctgaagattatgttcatttaaaaatcttctcaccttaccaatctcagattgcggctgcaggatcattgtatccaaactttctactaccggatatccttctgtcagaattttaatcaccagtcctccacccatgcctgcagcgatcattgtatccacttctcccggaagcactttttcaagtccgtccgaaagtcttgtctctattttccctttcagtccatgtccgaccacatgcattctggctctctccaacgggcctctgttaatatcgagtgcgatcacctttccggctatattgtgttctataagataaataggaatataaccatgatctgtaccgacatctgcaacagaagcgccctctgtcaccagatctgcaactgcctgcagtctctttgatagttccataggcgcctcttttcttaatctaaataatctcttaattttctgctgcggctcggatgacggagctttctgagcgctttcgcctcaatctgacggatacgttcacgggtaacgtcaaattcttttccaacttcttccaatgtgcgtgcacgtccatcgttcataccgaatcttaatcgcaataccttctgttctctttctgtcagagtatccagaacctcgtcaagctgttctttcagaagtgtctgggctgccgcttctgccggtaccggtacattatcatcctgaataaaatctccaagatgactgtcctcttcttcaccgatcggtgtttccagagaaacaggttcctgagaaatcttaaggatttctcttactctttctaccggcatatcaagttcagctgcaatctcttccggcgcaggttcacgcccaagttcctgcagtaactgtctggatacgcggatcagtttattaattgtctcaaccatatgaaccggaatacggattgtccttgcctgatctgcaattgctcttgtaatagcctgtctgatccaccacgtagcataagtactgaatttaaatcctttatgataatcaaacttttctactgccttaatcagtcccagatttccctcctgaatcaggtcaaggaacagcatgccacgaccaacatatcgttttgcaatacttactaccagacgcaagtttgcttctgccagtctcttctttgcctcctcgtccccatctgccattcttttggccagttcaacttcttcttctgccgacaaaagcggcacctttccaatttccttcagatacatacgtaccggatcttcaatactgattccatctggtaccgatagatcaatcttctctacatcaatatcatcttcgtctgacattacgatttcatccggaatatcatcatcgtcattactgattctgagcacatcaacgttgtttgcttccaggtaatcaaataccttctccatctgatctgaatccagttccatatcagagaagaaatcattaatttcctgaatctccaggattccctttttcttttttccaagtgatacaagttctcttaatttttcctggaattttacaatattttcgtccatgtaatgtccatcctctcattgcttgtttatattttatccttaattaatggaaatatgcagtgtccgaagatcctgcatctttcttttttcattcatcaggcgctgcaatccctgaatatctgtaggatccagattctttgttgcttcttcaatgctgtgttccttgactctcagaattgtctcctgcagtgccttttcctgctccttcaccgttgtcagttctttgatcttcgtgtggaacagtcctgccacttcccgatgttcctcttcatctgtaaaatgattcataatctgcgccggattggcttcatgtttttcatactgttcatataaaagttctgccacttttctgaaaagtccttccgaaaaatcttccggtgtaatatacttttcaatctggtgaaaaatctcttcactttcaatcagccatgtaagcagcaccttctgggatactaaaattccgtcttcttttttattcttcctgttattttgtatctccctcggtctttctgcaggctttgcaagtcctgtctgtaccgccatcttaccgaccagttttcgaagctcttcaaatccgacatgataggcctttgccactgcttctatgtaattattacgttcaatttcttcttcaaactgtgtaagccttcttgccgtctccttcatgaactccgtctttccttccggtgaattcatatcatagtctttctccagtacttccagactgtacatgaatacatttctcgcacttgcgattcgctcttcaaatgcttctgcacccagattcttaataaattcatccgggtccttatacggttccattcttatgatctttgctgtgattccggcatctctcaggattggcatcgctcttaatgccgcccttgtaccggccccgtcactgtcataagtcagatacacttcctgtacatacctgtgaatcagtgcagcatgtcccggtgtcagtgctgtacccagtgatgcaaccgcattggtaaatcctgcctgatgcaatgatatcacgtccatatagccctcacacaaaaggaaatatggctttttggtacgccttgcccggttcaggccatacagattccgacttttatcaaagatcattgtctccggggagttcaggtattttggctttgcatcgcccataacacggccgccgaatccgatcacccggctgttgacatccatgatcggaaacatcacacgattccagaacttgtcatacaccccgttcttttcatcaatgctgatcaatcccgccttggcaatcatatcatctttataccctttggacttcagataccgatacaggtcatcgctgtacttattcgaataacccagaccgaacgccttaatggtctcatcactaagcttacgctttttaaaatattccaatccgaccgcaccccggctgctcttaagctgtatataataatactgtgctgcagctttgttgatctccagaagtatcgctctggtatccgcacgttcttttgcttctctggaatactcttcctccggaagttccactcctgcccggtctgccagatatttcaacgcttcaacaaatgtataattctcatactccatcagaaatgtaaatacatttcctcctgccccgcatccaaagcaataatacatctgcttctgtctgctgacagaaaaagaaggagacttttcattatgaaacgggcacaggccaaaatatgaacttccttttttctgcagttttacataagtagatatcacatctacgatatcatttcttgatcttacttcttcaataatctcatcagaataatacattttgaatctcctcattattattattcgacaaaactttttgctttcctttaatttttttctttttttattgacttttttgtgtataatgatatattggggtattatggatatagaaacaaaaaagaacttccatataaatgaaagtccttttctaatgatgaatgcggaagatgggacttgaacccacacaagcgcaatgcttacaagatccttagtcttgctcgtctgccagttccgacacttccgcgcattcattatgtaattttcacctttctatcaagaaaggtaactgcggaagatgggacttgaacccacacaagcgcaatgcttacaagatccttagtcttgctcgtctgccagttccgacacttccgcattcatctttgctctctcgcgaagacaagatatataatacatgagaattgttattctgtcaacagtttttttgaaattttttaatttttttgaactattgcataaactgttaatatttcttctgtttcagcagtacatgcttaatgtatgaaaaagttttttcttctccttcttcggccagcatctctaacaattcatgcaaaagttttgccgtatccggatgaatcatttttccaagtcttgccgcacccttttcgtaatattccaatggatgccagtttctgtatgcttctccctggtaagtctttgaagctgcaatacgatccatgaacatctctaccacgtaccgaagcggcattttcaaaccaaccatgccttctcccggtgtcacactataatcaatccagtattcataatgatgcttattccgtcctttatgatgaagccatgcccgggaatatccggttgcttctctttccgcattattcggacttcgatttccctgatagtacttacatcccacaaggaactccgtcggagaatattttgacatatcatgaagaaggccctgcttataaagtcctacttcaaaacattctttcataacaagatatttatgatgattgatcgtctgtaagtgttgtaatgctttcatttttcttcgtctcaacctccacaatccggtccgccgtaaacaccacgatcgacctctcttttaactctgcttttctctggtcttttaaaagttccgggtaatccagaattccacgatctgtcgttgctcttacataccacccatatcccttaggcaacgccggcagcgcaaatacgtgctccagccaatgcatattatatgccacatagcaatccgcattcttcgtccgggctccactgtaatatactccaagctgtctgcttgatacttctttcggcacctgccaagcttcctcgccatgatacgatacatcaggaacgccacagcaactcagatcaatcccctgaagttccctctcgggtgtcagaagatcatgctcttttctaaataaaatcagttttttaacaaaatcatgtaacgtctttttcttttccagcccccgccagtccgtccatccgacagaattgtcctggcagtaaacattattattgcccttttgggtgttaccgaattcatctcctgccagtatacatggtgttccttgtgaaagaagtaacaggaaaaacgcattataaatctgatgttttcgaagttctgtaacagcttttttcctgcttggcccttccgccccgcagttccagctgtaattataatccggtccgtcctgattcttttctccattttcctcattgtgttttgagtcataggatacaagatcatttaaagtaaaaccgttctgatctgtaatacaattaaatattccctgtttctctgaatgatgcttaagccagtaaatcacatccggaatcatgccttcatcgcctttaaggaaacgacgcatcactgtctggaatcccagttcgtgttccattatctttgtttttttcaaaaccggatctgcatgaacactttctatcggaatgaccaatgggttcagtataaaaccatctatatgatattccatcacataataccgcaggcattccagcatcatcatcttatctgcacctgtacagaacggcatttcaagcacaacctctattccggctttatggcatgctttgaccatatccttaagtcctctggccccatcaccatccgaagaatatgcactcttaggagcaaaatagaacccttctccatatccccagtaatttctatatgtctggcattcctcaaattcatacaccggcatacaatggatctgattaattccaagatctgtaagataatctatcttttctataatcccctgaaacgttcctttcgactttaccttcgacgaagcatgtcttgtaaatccccttacatgcagactgtaggcaattacctgatgataagggatctgtaaagtgtggtctccctcccagtcatactcctgtgacagaaaacggcctctgatttcatgtctggcggtctctttttttacaccccaatgctctcttccagccagcgcctgcacataaggatccacaacaacctcaccatcaatcaaataattatactcatactctgccggttcgatatccgtaagtgcaatacagcgtacttctcccactgccgtctccatctcaaattgtctgtacagtcgttttcttcctgcacgatatattaacagctgacattttttctctgtcggaactgcaatcgaaaaatttattttgttctcactgatctgaacccccagcggtaacggatatccctgaacctctctcatattatttccttcccattgtctgctgacgcctattgccatccatctgcgccatacatttcaacattctctttattgatcataaatacatctacggatgtctctttttcaaaatctttcccctccagaatatccaatgcaatatcaaccgctttctttccgatgttgaccggcgactgtgcaacggttcctgcaatctgaccatctgccttttttaattctttttttatatccggagagccgtctatactgtatacaaccgtctgatcatttccagcaagattcaatgcagtcttagctgccacggccatctgatcatttccacacataatcgcagtaatatccggctgttcattcagaatcttttttgcagcttccagtgcactgtcgaacgttccgttggtatcttctcttgctacgacttcaaatcctttttccgctttggcaattgtctgctcaaatcccgtaatacggtcattgatcgaattctgctttgttgcctccagaatcgccactgtcccgccatccggatacttttcaatcaggtcattaccacagagcttacccgcttcgctgttattagaaccgacataggcatctatatagtctgtatctttcacctgtgaatctatattgatgatcttcacaccagcctcttgcaaagcctgtaatgacggagtaatcttttcccagtctaccgggcaaagaaagattgcattaatcccctcatcgatcatctcctgtatctgctccgcctgcgtatccgcattcgatgacgggtcttttactaccattgtgcactcttctttatccacgacctgctgtacggcctcttcaagtgttataaaatacggattctgcatatcaattacagaaaagccaaatttgtactttcctgcatcatctgtctgatctgtatcctccgaatcatctgttgtatcctcactgactgcattatccactggttttcctgcttcctttttgcatgcggataatgcgaaaatgcatacgagtaatactgcgatcactcctaacattctcttcttcatcatgttgttattcctccttattattgcgttacatacagctacattttacaacatttttgtctgtttgactactatcatcttgctttttatcgctttctttgttaaagttaagataagttttaaagttagtaaaggagactatgatatgagcgacacaaaggaaacagaaggctacaccacagtagagcttacacttgacaatgacgaagtcatcgaatgtgcaatcctcacagtatatgaagctgcaggcaaggaatacattgccctgctgcctctggacgaaaatcttgagccgaatgaagctggtgatgtttatctttatcagtataatgaaaccgaggacggcgaacctgacctcggcaacattgaagacgatgaagaatatgaaattgcagcggatgcatttgatgaatggatggattctcaggaattcgacgaatcagacattgaggagtaattcggatacaaaacgggaagggagaagatctttcccgtttttttcttttacataactgataaccagctttctcttcgctcttgtcatcgccacataaaaaagccggcgttcttcttctatttcttcgtcggtagttgctttcttgtatgggcagcttccctcatttgcttcaatcacaaatacggtatcaaactcaagtccctttgcagcatgcattgtcatcaggtttaccccttctttttctccgtttttcttattctgttctttcagcatttttccataactttcaatatgttcaaaccattcttttatggtgccataccccttggagttctgccagatttcttcgagcactgcaaaaagatcttccgaagaaatctttctgtatgctgcatattccttcaggaactcatcatatcccatgcgtttccgtatatattgaatggctgcatacggtgtcttgtcacagatcatcttcatgtcccattccagctgatcgattctgtcaaccatccagtctttatcccggtaatatctccggagtgattcataagaaacatttcctgtcttcatactctctcttgtaagatagcggtttggccggttcgcaatctggagaaaatattttctgtcatattctccctgtgacaaacggagataactgatcatatcaagtgctataaaatgctcataaatgttattcagatgttctttcatcacaaacgggatctgatactccgtcatcagttctgacattgcccttgcatccacatttgtcctgtacaatacagccatttccgtatacgatacacctttttcccggtattcgcgaatcctttccaacacatattccgcttcctgcaccggatcttttacttcctgaacatgaactgtctcatctggtttcctgaatgcctctatctttttttcaaaccggattttattatttccgatcacacgcagagccccttttacaatatatccgctgctgcgataattgacatccagaaggatctgtctggcctttggataatccttcataaattccatcatgattcccggctttgcccctctgaatccatacactgactgatcatcatcccctaccacaaacagattgtcctgaggcgccgccagcatccgtaccacatcatattgtgcctgattcacatcctgaaattcatctacaagaatatactgaaatttttcctgccattttttcaggatatccggccgtttcataaaaagatctctgcactgtatcagcatatcctcaaaatcaattttacgatatttcttttttgtctcctcataggttctgtacagtttgcggaatttctctgtcgtatatttcaccggctcatattcttcaatatccatacagttattttttacatttcctatctcgatcgccagttcctgcagataatctttttcttcatctgcctccggttcctgatcccagtcaattccgggtaaaatttctcttaatatcctgtacttttcttcatccgataaaagattcgactgattcaggcgatacgcccatttcaaaattccataatatattccatgaaatgtgccgaatgttactgcataagaagaagggccacatatacttcgggtcctgtttttcatctcccaagccgcatacttagtaaaggtaatgaccagaatttcttctggccttaccttatgcttcatgatcagatattctattctctttgcaatggttagagttttccctgaaccgggaccggcaaggaccatacatggtcctttattatgggcgactgcctctgtctgagcatgatttaaactcatagaatccccttacttgcttaataattcaattccgtctttaatacgttttacagattcttcttttccaagaatttccataatctctgttgcaccacccggcgtgctctgttttccggaaactgcagtacggattggccacattacatatcctactttcacgcccttctcatcaacatactttttaagaagtgcaaataatgcatcattactgtaatcttcctgagcttccagcagcggcagaacttcttttaatacttccagtgaattttcttcattcgttttcatctttttatggcagtacatagctgtatcatattccggtactgcttcaaagaaatcaatctgttcctcgatatccgggaaaatctcaattcttgattttaccagtgctgcaatcttcttcagatcataatcttttgtaataacatcgcggacatacttctcggctctttcataaaacttatcgaagtccatagccttgatatattccccattcatccacttcagttttccaagatcgaatacagccggtgacttgttcattcgatggaaatcaaatgcttttaccagttcttccagtgagaagatctcctgatttccttccggtgaccatccaagaagtgctacgtagtttacaactgcctctgtcacaaatccctgctcaatcagatcttcgtaagaagagtgtccgcaacgtttactcagtttcttatggttctcatctgtaataagcggacaatgaacatataccggtacatcccatccaaaagcttcatagatcttattatacttcggtgcagatgacagatattcattaccgcgcactacatgtgtaattcccatcaggtgatcatcgacaacattggcaaaattatatgtcggatatccgtctgacttgatcaggatcagatcgtccagttcctcattcggcactgtaatatctccgtaaatctcatcatggaatgttgttgtgccttctgtaggcatgttaaaacggataacatgtggttttcccgctgcgagattcgcctcaacctcttctttacttaaatgcaggcagtgcttgtcatatacaacaatctctgttccgccatcttcatctgaaactttactcttcagcgattccagacgctctttatcgcagaaacaataataagcatccccctgttcaatcagctgttttgcatatttcagataaattccctgtgcattacgttcactctgtacatatggacctactcctccatctttatccggaccttcgtcgtgaaccagtcctgnnnnnnnnnnnnnnnnnnnnnnnnnnnnnnnnnnnnnnnnnnnnnnnnnnnnnnnnnnnnnnnnnnnnnnnnnnnnnnnnnnnnnnnnnnnnnnnnnnnnnnnnnnnnnnnnnnnnnnnnnnnnnnnnnnnnnnnnnnnnnnnnnnnnnnnnnnnnnnnnnnnnnnnnnnnnnnnnnnnnnaataagtatacaacgctgttcttaagtttcctacatgcattcttcctgtaggacttggtgcaaatcttgttcttaccttactcataactatcattatctcctgtttcttattgtttttaaatgtatgaaatctatgtattactacatacattagaacactattcgtcctttcattgtagcacaagtctgtaactgacagcaaccttttctatcatatctttcctttttgctgttttttgagttttctctcgatccaatattctttctggaaaacttctctcggaatagacacgatacacacaattccaagcacgattgcaaaagccacttttaccgctcccaatccttttaccgctgccatagcaagctgattggtcaccagataatatgccgtaaaatatattccggcacccggtactaacgtgataattcccgaaatcaggaaaattgtaataggacacttaagccgtaccgtcaacattcttgccaccagcacagtacacactgttccaataaatgatgctaccgcaacagaacaatatacagaagcgagcttatatatcatccagcccaccgatcccgtaattccacatcctatataaaatcttctgggcacctggaacatgaccgcatatgctatcgtcccgataaacgaacacgccagatttgctacaatttttatgaccatcacaaaacgcctcccaacacatgatgataaaccgtcagagctgccccgactccgattgcaatatatacaaataccatgaccgcatcaatcatcttcactgtacccgccagataatcactgtccgccagatcacggattgcatttacaaaagcaagtcccggtaccaatggcatgattccgcctgttacaattccttccatccgcagatttccaaatgccggtatctgcattgctgccaacgccatcgaagcaataataattcctcctacaatgtgaaccaggattttggaaattccgtgttttcctgcaaacaatgaccacgcaaacacgacacagccgacaaaaatcgccacaaacgcctccatcggtgttcctcccaacagatatcccagtcccccagcactcaaacctgcagctgcaatctgataggatatcctttttgtcggcattttatttatctgttttaattttttccaggcctcttctatccctacatgccctgctgcaatttctctggaaagatcgtttacttccgctacgatccccagatgtgtagaagaaagcggtacttgtttaacttttgtatataatttttctttatcagttcctgcacaaataaagagtccgtgactcaatgtgaataaatctacatatttcactccaaatctatgacagatccgcatcatcgtctcttccacacgaaaaatttctcctccgtttttcagaagcatccgtcctgcttccatcgcgagattgatcacacgttttgtatcaatctcagacatcagttcttttttcagatatttctcatcttcatcggaaaatccgcatttttcgcaaaattccatgatgtccaggcaacgttccttcttcatatatacccagtcatactgcgcacagtaatgttcacatatataatgtatcatatatctgccgtaaccttttccctgatccttttttatggttacgatattcttaatctcacatttcttttcttctgaaaatatcactatacaaagtgtgcggagctttccgtgttcttccagtaagaacagttctcctttttccagcaattttcgaattctggattcatccgggtcaccagctcgaagtaattctatataatcttctttcccgtctgtcacctgtcgaatattcatttttcgttctgctccttttttgattcttgaccctgcctattataacacctgtcattctaaaatcctagagcattttttcgcaaaaaagatgtgcttttcgcacaccctttttaccccaattatatcatcttccattcggccggcttataagttctcctcccttgttgtaaagcatcccatcccggctttcatacaccggattatccggtgcaacttcaatatacataagtccgcctatcttctccaatactcctggtgcaacaaaagtaatattcgccggaatatagacttctaccgcatccgaaattccatccagtgcatgttctcctattccgctgcatctttcatctgccggaaagatgatcatcccatcacacagaatcagatccagattctcatatccttctatcacgccttctgaattcaccttaaagccttccaggttcaacaagtcttctgtcattggttctcctgcaggttcttctgttatttttcctgttatagattccggaacactcttatccgtaactgtttcctgcgttatggtctctgttttcgcggagtccatatttgcccatgcagctttcccgtcttttgcttccggaacaccttttacttccggaattatttcttctgtttccgtcggtcttattacatcctgcatcgttttctttatcgtcacagacttacatacacttttcgcagttttctttacatccaaaaccttctgagttcctaattcaaaacaatcttttaccatatccacgccatgactttccgatactgctttgcagaatccttcaccggatcctgtataagcatccatcttctccacattcattattcctgcgacaagacgggtacaaattgccaatataatcaacatagccacatccattcggatccatctgtccatgttattacgttttaatataaatgtatctgcttttacaccggcactcttttgtatattcattcccatctatccaccttcttccctgacatttcacttatagtttatatatatgattataaagcacgtacttaaggaaagaaagtggcatctcgccacactcgagataccactttctttttagcagtttctttatatccttttatacgttgatttccgctgttacgccaaggatttccttatttgcttccagcatcggatttaccacattattcagatatgcctccacctgtaccggtgcacgtcctacatatttggcaggatccattgtcttctgcaattcttccagtgaaaggttgaatgccggatctgctgcgatcagttcaagcaggttattatccagtcctttttcttttacattacgtcctgcttccatagataattcacggattctctcatgaagttcctgtctgtctccaccggcttttacagcgtccatcatgatgttctctgtagccatgaacggaagttctgacataagtctcttttcaataactttcggatatacaaccagtccgtctactacattcagacacaagtccagaataccgtcaattgcaaggaatccttctggtacgctgagacgtttgtttgctgaatcatccagtgttctttcaaaccactgtgtcgcagaagtgattgccgggttcatggcatccaccatcacatatctggaaagtgaagcaattctttcacttctcattgggtttctcttatatgccattgcagaagatccaatctgtgtcttctcaaacggttcttcaatctctttcagatgctgaaggagacggatatcattggacatcttatgggcacttgctgcgatacctgcaagtacattcacaaccctggtatccaccttacgtgaataagtctgtcctgataccggatagcaggtctcaaatcccatcttcttggcgatcatcggatcaatcttatcgatcgtctcctgatctccgtcaaagagttccaggaaacttgcctgtgttcctgtcgttcccttagatccaagaagttttaagcttcccttcacatattccagatcttcaagatccatcataaattcctgcatccaaagcgttgctctcttacctactgtagtaggctgtgcaggctggaaatgtgtgaatgccagtgtcggaagattcttgtgttcatctgcgaactttgcaagttcggcgatcacattgatcagtttctttctgacgatttccagtgcttctgacatcaggatgatatctgtattatcacctacatagcaggaagttgctccaagatggatgattccttttgccttcggacactgttttccatatgcgtatacatgagacattacatcatggcggactactttttctctttcttttgccacatcataattgatgtcatctgcatgtgcttttaattcctcaatctgttcatctgtaatatcaagtcccagctctttttccgtctccgcaagagcgatccagagttttctccatgtgcggaacttcttatccggcgaaaaaatgtactgcatctctttgcttgcatatctttctgaaagtggacttgtatatctgtcgttactcatactcataatctccttcatcaattcttctacctgactattttaacctgttttttattcaaacgccagtgaaatatctcttcccggtacttccatcgggtaatttcccgtgaagcatgcatcacagaatgccagatctccaaccatatctttcagcttttcaacttccatatatccaagcgaatctgccccgatcatctcacggatctgttccgttgtatgagaatgtgcgatcaactgttcatttgaaggcacatctgttccgaaataacatggatgtaagaacggtggggaactgattcttacatgcacttcctttgctccggccttcttgagcatcttaatgatattcgcacaggttgttccacgtacaatagaatcatccaccataacaatacgttttccttttacaacctcttcaattacattcagcttaatctttacactgctttctctctggctttgttttggcttaataaatgttcttccgacgtaactgttcttatggaatgccattccatacgggataccagactgttccgaatatccttttgccgcaaccagtccggaatccggcacgccaacaaccagatcagcatctaccggatacgactctgccagtgcctttcccgcaacaattcttgcatgatagacattaacattatcaatcacactgtccattcttgcgaaatatatatattcaaaaatacatcttgcctgcttcttcggatcgatcgccatggatttatccgatttcattccatgttttgtgaagcttacaatttctccaggctctacatctcttacgaattctccgccaacggcagcaatcgcacagctttcggaagcaaggaaatatgtattatctctctttccgatacagagcggtttcagtccgaacggatctcttgctccgatcaattttctcggcgaggtaacaaccagcgcatatgcacctttgatcttcttcatcgcatttttcaccgcgtcttctgccttctttacattcagacgttctctggcaatatgatatgcaatcacttcagaatcaatcgttgtctggaaaattgcgcctgtgtactccagttcatggcgaagctcgattgcattggtcaggttaccattatgtgcgatcgcaagaattcctttcacataattaataaccagtggcatcgcattttctgctctggaaccacccgccgtcgaatatctgacatgtccgacaccaagatttcccttcagtttctgaagcgactcttcatcgaatacttcatttaccagtccaaggcctttcttggaatgtacttttctctctccatatgtatccgtcaccgcaataccacagctttcctgtcctctgtgctgcaatgcaaaaagtccataataaacggatggtgcaacatctccgccatccatatcataggctccaaacacaccgcattcttcacccagtcctgttgttactttttcaaattcactcataaatgcagactccattcttttcaaatttttcatttgtcaaaactgtctttaaaaagcattttgctatattagtataatacaaggcagaaggaaaagcaatatttccacctgccttgtactcgtaccgatacattatttatagcgcgccttttaataagttccacttataattgtgttttattcattagaattttaacatacaatctcttttgaacgcatgacgattaatcattgaatttccccagaaattctttcattctttcattcgatgaatcaaatacttcctccggagttccttccactgcgatcactcccccgtccataaaaatcacatgatcagatacatttctcgcaaaattcatctcatgggtgacaattaccatcgtcatatgttccattgcaagttcacgaatgaccttcagaatctctgcagtaagttccggatctaatgccgacgtcggctcatcaaagaacagaatgtccggattcagcgcaagtgctctcgcaatcgatacacgctgctgttgtccgcccgataactgacatggatatgcattttccttatcggaaagtcccatcttctttaaaagctctcttgcttctttataaacctcttctttcttacgcttctgcactttgatcggcgcatctgtaatattcttcatcaccgaataatgcgggaacagattaaagttctgaaatacgagtccgaatgttccttcgtaatgaatctctcccgcatccgcagtctcaagtcctgtcgcacaccgaagaagtgtcgatttaccggaacccgacgggccgataatacccagaacttctcccttttctacctttagagaaatgtctttcagaacttctactccattaaagctttttttaatatttttcatttcaagcagactcatggtctattcctcctaatggtaataattcaatttttcttcaatcttctccatgatcatcgcaaccagcaggttgaacacataatagaagataccggccgcgatatatggaaccatagaggtctgtgccgctgcgatttgctttgccatagtaaacatctcagttaccgccaatacaaatgcaagtgaagtatcttttaccaatgtaatgatctcattcgtcacggcaggcagaatatgtttacacacctgtggaaatacaatacggaaaaatgtctgacctttcgaatacccaagcacctttgccgcttcatactgtcccaccggaattgcttcaattccgcctctgtaaatttctgcaaaatatgccgcataattaattgcaaaaccaatcagtactgctgtcatacgatatcctgtggaaattcgcattccaaacagataataaggtccgaaatacaccaccataagctgcaacatcagcggtgttcctctcataattgatatgtataattttgaaatccatctgaccggtgcgatcttcgacattctgccaaatgcaactactagtccaagaggcagagaaaagagtaatgtcaggataaatatctctgccgagatccacattcctccaccaagctctcttatcagtgttcctatctccatctgttacatcctccagttctttcaagcgagtaaaaaagagccaatcccctccggggttggccccttcattttacttaccgttctttcctatacaaagagctcccggaactccgtaatctgcatatttttctgcaatcttatccactgttccgtcttctgccatttcatccagtgtcttctggactttatctttcagctctgtatttccttttttgaatccaaccgcatactgttcagatgaaatttctttatccaggatcttataatcatccggattttttcttgaattcacctgatagttcgcaactccgatatccattgcaattgcatcgcatgcaccagattccagatccatgaatgctgtattatattcagcaacctgattcagatctgcaaatgttgccgccagatctttctgatccccttccagtgccgcaagtgcggaagaatccgtctgtacttccacatgctttcccttcagcccggcaaaatcatcaataccggaatcacttctgactactacaacctgcttgttatcaatatatggatctgaccacgtgtaatcatcttcacgaccgttcatagtaaatccattccagatacagtctatcgtcccagaattcagttccgcgtccttggaatcgaagtcagatattctttctttttcccaactttatagcgatattgcttttcccatccctgtttctgagcagttttaaattcagaagcagtaaaccctttttcttccccatctttgatacagagatattctttttctgttttatactgccatgttccattttcatttaatggtcggacagtaagaagaatgtgtgcatggggattgtgaccatctgtatcgtgaatggcaaaatcagcacacatccccatatctacaaaattctttttaataaaatcttgaagaagagaaatattgctgcctttatccaactcaacggggagtgcgacaacaaattctcttgcaagtcggctgtctttggtcttttcgttttcttccacagcattccagagttgttcccggtcattccattccaatggagccattggaggaagcatcacctcctgatagatcagcccctgctttctggtatagtcatgctggatgccgtcataatcattgtacatgcggctacagctcatataagcagaagcagcaacagcagaccgaccggaaccacggctgacgactttggcttgcatatgataaattgccatatctggcacctcctttcgatgttgcctgcaatagcggataaagccctcggcagagcgcacgagccccgaaggggataccactgcctgatttatcaggtggtgagtaagtgcgcccttcgggagtagaacttgtgcgtttacattccccgtagccggatcatcagctcccgtttcagggaatctaaatccatttctttaatatggggaacaatactttccagaattgctccttcttggactaacctgtgtgttctggcatcacgttcttttttgcgatttcttgcttcggcttcttcctggcggtgtcttgcctgtaaaagtgctttttcttccggtgtcatgatttttttatctgccatatctggcacctcctttttgtggcagctctaagcagagaaaataaggaactgaaaagaaagaatgagaaattgcagaaagcattacggaaacaggatttgaattttattaagagcttataaatttactcaatgtatctgcaaaattacttttttatgttatactaaaactaattttagtattggaagaggtgaaaatcatagatggaatattttaatatggttttatcggcacttggaggaggaacagcggtagcagtagcgacaattttatttctaaaaaataaaatagaaaaattgatagataaaaaaatagattactattttgaaagtaagcttgaaaataaaaagggcattattgaacaaaaagtatatgtcagtcagcataagtttgataaagaatatgaaataattcaagagttgatggaaaaagcatttaatttcacgtatcttacatggaatgtatatagcactattggatattctgataaagatgatagtagtgttgagaatgttgaaaaatatacaaaagaatgtgatgaatttactctgttttacatgagaaattgtgcttttattacagaagatttagctaaaacatttgatttgtttgtaaagaaaattaacgatttcagagtagcagctgtaaaatataagaatttactaagtgaagcatcaggtaaagagaatgagatacttttgacattatcaaataagatgagaacaattcatgatgaaataaatacgaaatctgagtatagtcatgataaattggttgagattacaagaaaacattatgaaaaacttgatattaagtaattaaagtacataggatgatggtgtatctataaaaaagaatttttggtttgttatataaagtaatgagttataaccataaggtacatactcgataaaaaatcggaacttctcaggaggcttcgatttttttataatgtaattgtaaagaaacggtggaatccataaaggctgcgggattgcataggcaaatcagaactactatgacagtatacggaaagtgcaacacaaaacacagttttgtataccgttaaacccagtaaaatcaacgcatgaggggaactggctacattttactatcctatctggtggggaattgcagcatggccagtagataactttgtaaaagagaatgactttgcaggaaaaacagtcatcccattctgtacagcagcgacctcgggaatcggtgacagcggtaatcttctggaagagatgacaggaacaggtgactggaaagaaggggaacgattccatggtggagcgtctgaatcagatatcagttcatggatagacagtcttggattataaaagaatataaaaatatttggaggaatcgtaataagtaagacataacctttaggtttaaactgcctaacaaagagagacttctgtccggagtctctttttcttatacttacagtaaagtttgaaatatagaaaaggaagataaagatggagataagaattttaggaagagacttagaagtatcagaaatcggatttggatgtatgggaatgagtcatgcatatggaactgtttcaacacagaaagaagcagaagaattgattgaaaaagcgatcgatgaaggctgcacattttttgatacggcagagatatacggaacaacagaagaccctcatcacaatgaaaaactgcttgggaaagtgttaaggccatatagaaacaaaattgtccttgcatcaaagtgtgggatacgttttgatgaaactgcaacaactgtaaataaacctttgattcctgatggacgaccggagacgattaaagcatcgattgagggatctttaatgagacttaacacagaccatcttgatttatattatattcatcgtattgacatgactgtaccgattgaagagacggcaggagctatgaaggagttaatggagcagggaaaaatcacacactgggggttatcagaagccagtgaagagattattcgacgtgcacataaagtatgcccggttacagcgattcagaacagatattccatgatgtacagggattatgagaaattattcccggtgcttgaagaattgaaaataggatttgttgcattttcgccgcttgcaaatggattactgacagcagcatatcattcccatggggaatttgaaaagccgggagattatcgaagcgcaatgccacagtttacagaagaaggattaaaggaaaataatgaatttatgtcctggatgaaagtgattgcagaagaaaaaaatgccacgcctgcacagatttctcttgcatggatgcttgcaaagaaaccatatatcgtaccaattccgggaacaagaaaagtaaatagactggaagaaaatatggaatcagcagatataaagctgactcaggatgaagtaaaatctatagatgagatgcttgcccatatgccgatgtcgcaggtgtttggaggttcaaaaatacagaagaaataaaagaggtgagcaatgaaaacaaggaaaaagataaccatcggggtaatagtggctttcttagcggtagtcatggtgggttatatctatctgtttacaggggttaaaataagtaaaggagaatagagataatgaagaaaatgttagttgtatattattcctggtcaaatggaaacacgaaaagaattgcagagcagctgactaatgggacaggtgcagatattgcgagaatcgaaacaacagagccatacagcggcagtcatgaagatgtggttgaacagggaaaaagagaggtagaggcaggctttatgcctcagatcaatccgatatctgtaaatcttgctgattatgatgtgattgctatcggaactccaacgtggtggtatacgatggcacctgcagtgcttacatttttgacaacaaatgattttacaggaaagacagtgattccatttatgacaaatggtggatggccggggcatgttataaaagatatggaggaaaattgcaaaggagctgcctttgcacatgaaatgcagattcagtttgattccaaaggaaaagatcatctggaaacttcagaagaggtgattacagaatggattgggcagataaatactgatataaacaaataaccataaggagagataaaacaatgagaaaaaattttggagcaaagccatttttatatccacagccggttatgattctgggaacctatgatgaaaatggaaaggcaaatgcaatgaacgctgcatggggcggaattgtaggtgcaaatgagattattgtagatttgtctgcccataagacaacagacaatattataaaaaataaggcttttacagtaggggtggcagatcttgaacatctggttgcctgcgattatgtgggaattgtttctgcaaataaagaagcagataagatgaaaaaagcaggctttactacaacgaaaggtgaatttgtaaatgcaccaatcatcaatgaacttccattgactcttgagtgtgaacttgtaaaagtcattgatggcagcaagtatcttgcggaaattaaaaatgtaagtgcagatgagaaatatctcggtgatgacggagaaattgatcttagtaagtttacaccaattacatatgatccggtacatcacggatattacagacttggagaacgtgtgggaaatgcttttacggatggagcaaagttaaaataaggacaggtgattaaagtgaaaaaaattgtacagacagcaggaagaaacgcactgaatgaatttgcaccacagtttgcacattttaatgatgatgttttgtttggagaaaactggaataatcaggatattgatgtaaagacaagatgtattataacagtcacagcacttatcgcttcaggaatgattaatacatctttagtacatcattttgaaaatgcaaaagctcatggagtgactcagaaagaaattgcagccgtgattacccatatagcattttatgcagggtggccaaaaggatgggcggcattcaatcttgcaaaagatgtctggagtatagacgaaggtgatctttcatatgaagatgaagcaatgagagctcatgctaaaaagatgatattcccgattggagagccaaatgataaatttgcacaatattttacagggaaaagttttttggctcctgtgtctacgtcacaggttggaattttcaatgtgacttttgaacctggttgcagaaataactggcatattcatcatgcaaaaagcggaggcggacagattcttatctgcattgcaggacgtggatactatcaggaagaaggaaaagaagcagtagaaatgaaacccggagattgtgtcaatattccggcagaagtaaaacactggcatggagcagcaccagatgaatggttttcacatctggcaattgaagtaccgggagaaaaaacatcatccgaatggtgtgaaatagtaacggatgagatatatggaaaactgaaataagtactttctcccaaaagtgggaaaaagaaattttacggcgaacaattatgtccgccgtaaaattatgtctgttttgttaaaaagtctgatagctgttgtccaagaaagaaaccaacctgtggatataactcctggatttcctgatattttgcttcaatcatttctggttcatcagtccagatcttttcatatattttgaaagctcttttaaaatgtgttttggcttgcggaagattggcagtcattagataaatgggggattcagggagtatctgttgcggaaagagcagccagtgcgatttttatatgaaagtgagttatatgagataacaataaaagatgtgaaactgttcccacagggatactctgcgcttgctctgcatccagagtatctgaagaatgaaccgtctgttctgcttgttgatattggtggctggaccgttgaccttatgaggctggacaatgctgttcctaaaatatcgccagccatagcatggctgacgatacaaaaatttattattttttattgtcctcttgacgggaagcataccacaccaaagactccgggagttttttatcattatatgatatatgatatgtatgatatgttcgaaaaaagatcactctgccgcaatcaccatcgtcctgtggatcttcttccttacaaaccagaagcagatcacctgcatgatgatcgttgcaatccaggataccggataagacagaaacaagaaagtcagtgatctgtgtgacgggaacagtccatagatccagataatccggactccgaccgtaccgatgatagaaaggatcatcggtaccgtggaatatcccattcctctcagtgctcccgggaacagatccatcagaccgcacaggaaataggtaacggttgtataagaaaagatttccataccgtatttgataacatctgcctgattactgtaaatatgcagaagttccggtccgaatatgtacacactgcttccgaggatcaaagttaccacaactgaaaggatcatacagtcaatcagaaccctgtccatacgttttaatttcttcactccgtagttctggcttgtgaagctcatacaggcctgtgtgaaggagttcaccgacacatataagaatccgaaaatattattcgatgccgtatatcctgccattgcgatcgatccaaaagaattgaccgatgactgcagcatcgcatttgaaatattgattaccgtgctctggattcccgccggaaccccgacttcaaaaatctgcttcagatacacggatctgatccgaagctttgcaaggtgaagctgatagctgctctctgtgtgatgcaggcaccggagtaccaagatacaggataccagctgggatataacggtcgcaatcccgacgcctgctacatccagatgaaaaacgatgaccaggaacagattcaatactgcattaatcactccggatacgatcaggaaaatcaacggacgtttggtatcccccactgcccttaatatggctgctccatagttatacatcataaaaaatggcataccgcagaaataaatccgcatataaagtgtggatttggcaattacatcatccggtgtccccataatttccagcgcgcctctggcaaagaccactccgatcaccgccatcgccactccgcttaccagagcaagtgcaatagccgtatgtaccgtctccgacatttcttttgtttttccggccgcataatatctcgctgcaagtacatttgctcccaatgagattccgatgaaaagattggtaaacacattgatcagtgccgttgtcgaacccaccgctgcgagcgcctgacttccgctgaaacgtcccactaccacgatatccaccgcattgaacatcagctgtaagattcctgacagcatcagtggtatggaaaatgaaatcaatttgtccatgatggttccattgcacatatcaatctcatatttatttttcttcaaaacaactctctccttttatagtaatatcttcaatcaaagcataaagccgtaatttttattgtagcatagatttatcgtttgtgaacatttaattattaattcgttttatatgtgtaaagacattttccttgacagaacatcaaaaacaacctataatcacttagcttatatgttttcatttacattcattgtaaacatccatatcagtaaatataaaaaaggagaatacgtatgaatattcagctctcagagcattttacctataaaaaattacttcgttttatcctgccctccattattatgatggtattcacttccatctacagtgtggtggacggcatctttgtatcgaactttgtgggaaaatcagcatttgcttccgtgaatctcattatgccttacctgatgggaatcagtgcacttggatttatgatcggtaccggaggaagtgcttttgtatcaaaaacccttggtgaaggaaagaaagaactggcaaatcagtatttttcgatgctggttacgattgctgctatcggaggatttgtgttatctgttctcagttttatatttatgaggcggattgtcatggcatttggtgccgccggtgatctgattgattattgtaccctttacggacggatctcctgcatatccctgaccgccttcatgctgcagaatgtcttccagagtttctttgtggctgctggaaaaccccagcttggactgaaagtcattgtggctgccggttgtacaaacattgttctcgatgccctgttcatcggtgtattacactttggaattgcaggcgccgcgttcgcaaccatgaccagtgaatttatcggcggtctgctcccggtggtatatttcttccgtaagaacgacagcctccttcactttgtaaaaccggtattcgacagacgtgtatttcttaagacctgcaccaatggttcctcggaactcatgactaacctgtccatgtccttagtcaatgcattatacaatctccagctcatgaagattgccggagaaaatggtgttgctgcttatggtgcagttatgtacgtcaattttatctttgttgccacctttttaggctatgcaattggctgtgccccggttatcagctaccattatggtgctggaaatcacgcagagcttaaaaatctgtataaaaaaagtatgtctatcatactggtctggggcgtgatcctgttcggtgccgcacagttactggcacctgttctatctaagatatttgtcggttacaataccggcctgtacgctatgacactgcacggcttccgtgtatatgccattgcattcctgatcatcggtatcaatatcttcggatcctcgttctttactgcactgaataacggcctgatatcggctgtcatctcatttctgagaacgttagtgttccaggtcatcatggtcctgacacttccactctggttcgggatcaacggtatctggagtgcgatcagcattgcggaggcgctgacacttatcatgaccactacatttttcgtccgtcagaaagacaagtatcattacctgtaagacaatctctttcaaatgtataacaatataaaaaacgtatctctgcaatgtttccccactgtctgaaaaggaagcatctcagagatacgttttttatttattagaacatcttttaaaaattaatatcttcgatcctaattctcttccgcatagaacacattcttatccagtgccttgttctggtgtgcaacgattgttgtacatacagcatcacctgtgatattaacggcagttcttgtcatatccaggatacggtcgatacccatgatcagaccaattgcctcaaccggaagtccgacagaattgaataccattgtcagtgttaccagacctacacttggcacaccggccgtaccgatggatgcaagtgttgcagttccgattacagtaatataatctgtcatacttaagtggattccgaatgcctgtgcggcaaatacaacggctaccccctgcatgatcgaagtaccatccatattgatggtcgctccaagaggaatggtgaaagatgatatcttcttagatacacccaccttcttggtcagggtatcgattgacagcggaatcgttgcatttgatgttgctgttgagaatgcgaaggccataaccgggaagaacttcttgataaatttcagaggattcagtccggtaaatatcttcagtaagatctggtatacaccgaaacactggattgccagtgcaatcaatacaccgatcatatattttgccagcggtacaaatgcactgaatccgatgtttgcaaatgtgcggctgatcaggcagaagacaccaattggggcaagtgccatgatcatcatcgtcatttccatcatgatatcgttaaactggctgaagaagttcgcaactgtctctgcgcgttctcctaattttgcaaggatcacaccgatgatcaatgcaaatacgatgatctgcagcatctctccgcttgcaagagaattaatcgggttatcagggataatatttaacagcgtgtctgtcaatgaagtagccttcatagtttctacagatgctgcattggtcttgatcgtgctcatgtccagtcccacacccggattgatcaggtttccgacagacaatgctacggtaaccgcaagtgctgttgttgccagataaaagatcagtgttcttgcaccgactgtaccaagcttcttcgtatccccgatcgacatacttccgcacacaagcgaacagaataccagtggtacaaccaacatcttcatcagtttgataaagccttgtccgaccacgtacagtacaccttctacgataatgtcgtctttgatatgtccacttggaaccgcataacataaaataattccaaataccgctcctgcaagcaatgcaataaaaatcttcgttgtaagtcctattttcttcttttccttcttctgtgtctctcccatattagtcctccattctctcatccatatattctttcagtgaagctctccagtccggcatctcgtatacattgatgatacgaaggataaaattatccaggaccgcatatgctggtcttgcagaagaaagatccgattcgctggtcactaccgggcgcagagtgatcctctttcctgcaagtttcaaaacttcctgcgcaaattcataacgattacatacaccctgacaggttgcatggtacgttccgtattcattcgttttgatcagataaagaataatacgtgccaggtcttttgcactggtcggagaaccaaactgatctgatgcaatcagaagttcatcctttgtatctgctgcatgaagtacgcggtttacaaaattattgccatttccatacacccagttactgcgcaggatgaaatgcttgtgtgtaaattcctttacataattctcccctgctctcttggaacgtccgtaaacggtcttcggatttgtgtcatcgaactccgtatatggggtatgccggattccgtcaaatacatcatccgtggatatctgtaccatcttggcccctgtctttcttgccacaatacttaaatttcttgctcccagcgcattcacacggtatgcaagctccggttctttttcacagagatctgtatctgtgactgctgcacagttgatgatcacatccggacggttgatcactccgaaattcagcacctcatcggtgtccgtaatgtctaattcttccttatctgtgttaaacacttccatttccaatggatccaacacttcattgatggccgatccgatctgtccggatgcaccaacaatccataattttaacatatctgcttcctcctcatctgtcgggactggctgacgccagtctctctgctttccttttaatatagctagtatacacaaaaaaaccgtcagtttcaattcttaaccaacggtctcaaatctactcctctatggtatttttttccacacatcggtaatgtcagcgtttttactgacctcctgcaccacttttgtgctgcttatatgtagaatatctttcccttcattctgcataaatacaaacaccgcaaacagaatcatacaaataaatgtacgaattcccaggcttccctgttctgcctcttcctcaccatacagttcactataagatgccctgtatctaggatgtattgccggtatcccggattcctgatagctgtaacgtgtctgttccagaagttctcttcttcgcttttccgcttcattcacatgcgctcacctctgaaacaatatatgagatatctgtttcactcatgtgcaaaacttactgcatacaggctctttttcatgttttctaagagtttctgcttaacgatctgccaattcttttacgatgtcttcccatgtcagacctttttctaccatcagaaccattgcatgatacaggaaatccgcgatctcatatttgacttcttccggattcgaattctttgctgcgatcacaacttccgttgcttcttctccaatttttttcaggatcttatcaattcccttatcaaacagataattcgtgtaagacccctcctttggattctctttacggtctgcgatcgtgtcatataccgattcaaagatccgaagcggattcgtctcatcatagtcaattcctacaagcggctggaagaagcaggtcggattaccggtatggcatgctgctccgatctgatctacttttgcaagcaatgtatccagatcacagtcaatcgtcagggattttacatactggaaatgaccgctcgtctccccctttacccagagtttctgccggcttctgctaaaatacgtcatctttcctgtcttgatcgtctcatagaaagattcctcattcatatatgccagcatcaggatttcctgtgtcttataatgctggacgatgacagggatcaggccctgatcattggtcttaaactgtgagaactccatcatactctcaaaagatgtcatcttaattccttcttccgtacacttatctttgaatgccacacaatcaatatctgtacggcttacatatcttcccgaaagcccccggacacccgggcatttcaaaattttaaataactctgactcttcttccgtatccgtaatgatcacacacggtacatctgttacattcataatggaattcagatccagtctgtgcataaagacaatttcactgctgtaatcctggatcagatgctgatgtttgaacaatgcatcaaaatcatttaatgataccgcaagcttctcttttccgaatctctttgccgcatcctcaatcagtttgacactatccggcttagagaaattcagcattgcccgttttgcacctgtatacagaatcttcttaatatcttcctggcgtctgatattgccgcctgcgatcatcgggatcctgatcacacgattgatccgtttcatcaatgtgatcgtttcatcatgttcttcatccgaatctgagagatccagcacgatcagttcatctgcaccgtgatcactgtaatattttgcaagttcaattacgtctttggatacaacagtcggatcatcaatccatctgaccgctttcccgtcttttatgaaaatgcaaggtattaatcttttataactcatgtctgtccgtctccttttagaggcttccctttgtggtccatgcctcttttatccttggctcttccattgtcgccatatcaagtgcttttccgaacgctttaaacagcgcctccgccttgtgatgatcgttgataccatccagaatcttcaggtggatattcatcattgcgctgtaagaaactgcgtaaaagaattcccttaccatctcagtatccatctcacccatcttatctgacacaaactctgcattataattcagatatggtcttccggagagatccaccgcacaaagtgcgagtgtctcatccattggaagcataaagtggccataacgtttgattccggctttatctcctattgcttccagaatagcctgtccaagtacgattcccgtatcttcgatggtatgatgactgtccacttccagatctcctttcgcatgtaccgtcagatcgaacaatccgtgtcttgcaaatccattcaacatatgatcaaaaaaaccgattcctgtattaatctccgtctttccggttccatccaggttcagagttaccgtaatatccgtctcctttgtcgttcttgtcctggtgactgttctgttcatagctcctcgcctccttatttttctgctgtcttctactcttcgccctcaaaacggactttgatagaattggcatgtgccgtcagctgctctgcctcggcaaatgcttcaatatctttatgtatatcgcgtaatgcttcttccgaatatccgatgatacttgattttttaatgaaatcatccacagaaagcggtgagaaaaattttgctgtaccattggttggaagaacatggttcggtcctgcaaaataatctcccagtggttcacttgcgtattccccgataaagatggcaccggcattccttacttttgtcatcacatcatatggattctttgtctggatctccagatgttcggatgcgatctcatttgcaatatcaatcacatcatccatcgtatctgcgaccaggatataaccgtagttgtccagtgatttccggatgatctcacttctggaaagttcttttaagaaaccatccacttcatccgatactttccgggcaagttcttcagatgttgtgaccaggattgcagatgcaagttcatcatgctctgcctgtgaaagaagatctgctgccacaaatcttggatttgccgtctcatctgcaataacaagaatctcgcttggtccggcaattgcatcaatgcttacataaccataaactgcttttttcgccagagcaacatatatatttccaggtcctacgatcttatcgacttttggaatactctctgtcccgtatgccagagcagcaatcgcctgtgccccgccgactttatagatgacatccgcaccggcttcatgtgctgcaaccagtgtgtttggtgtcacttttccatcttttccgggcggtgtgaccatcacgatctcgtcaactccggctacctttgcaggtacaatgttcatcaatacagaagatggatataccgctttcccgcccggcacatatacaccaactctgtgaagtggtgtgaccttctgtcccaggattgttccgtccggtttgctgtcgaaccagctgtactgtctctgtttttcatgatacgtacggatgttcagaagagctttgcggatgatctccaccagttttggatctacttctttatatgcctcttcgatctcctcttctgtaaccttaatattgtctgcagtgatatctgcatgatcaaatttcttcgtatatgcaaatactgcctgatccttttcttcttttacatgagcgaggatttcctgaactccnnnnnnnnnnnnnnnnnnnnnnnnnnnnnnnnnnnnnnnnnnnnnnnnnnnnnnnnnnnnnnnnnnnnnnnnnnnnnnnnnnnnnnnnnnnnnnnnnnnnnnnnnnnnnnnnnnnnnnnnatcctccagtaagttctcttttgcatcttttgtcaaacgctgtattctcatagccttaaccgccatcctctcattttattttctctctgtctgtacagtattatacctgctcccgcagtcttgtcagcaggtctttgatccttgcgctttccatacgcatactgaccggattcacgatcatcctagcagacaacggacatacttcctccaacacttccagaccattttcacggagggttgaccctgtctctacaatatccacgatcacttcggacagtccgacgatcggtgcaagttcaatggaaccatttaacttaatgatctctacagtctgatgcttcgtgttatagaaataatcttttgcaatattcggatattttgttgctacccggatcagttcatgatgctgcagaagtggtgcggcatctttgtatccgcatacacacatcttacatttcccatatccaagatccagtacttcatgtaccttacgtccttcttccaggattgtatcttttccaacgactccgatatccgctgcgccatattctacatatgtcggaacatccggtccttttgcaagaaagaaacggagtttcaattcttcattggtgaaaatcagcttcctggaatctttatctttcatctcttcacaggtaatcccgattttctcaaataattctaatgtctgttttgccagacgtccttttcccagggcaaatgtcaggtatctcataatgtctaactcctatctgtactattcacgatcttctgctctccggtaacgagattgaccatcgttacttctccggtctcctcgatatataccagacttccggcataataatcatttccgtaacggatataatcttccaatccactgttttcatccttcttcagaagttctgcattcttggcttttctacggaaatccttcgcaaggcggattgcttcaagctgtcttccttccgcatatatgatgatcgtattctttcttggatatacgatgcggatcttctgacgggtcagtgcactcaccagttcatcaattacaatcgcaaaaccgatagatggtgatttcttaccgaacttttcgatcagatggtcataacgtccaccctttacaactgcatccccggttccgtaagtataaccacggaacacgattcctgtatagtatccataggttcctgtcatactcaggtcaaaagtgacaaatttttccactccgtaatagcgcaggatgtggtatatcttctccaggcgtctgattgccatcacacctttggagttcggcgcaaggttttccgctttttccaggatatcaattcctccgatcagttcattcaatgctgaaaatgcttctttggagcttctctttgcctgaatactgtccagaaattcttctacaccgaagtaattgcggttaccgatcagttctcttaccctttcttccgcctcttcatccagacttgcgtcttcgatcagactctggaagaaatcaacattaccgacacagagctggaattctttcagcccgatcgtcagcattgattcgatcaccagagcaagcatctctgcatctgcttctaccgaatcatctccgacaaattccgcacccatctgcgttgtctctcttaaacgtccctgatagctggaatggttcacgaatgtattccctgtatagcacagacggataggaagattctcatctttaaacaacgttgccgatgctcttgcgatcgacggtgtgatatccggtcttaataccagtgtgtttccgtctttatcaaagaatttataaagatcattagccggtgtcgttccgatctcttcacggaacacatcaaaatattcgatcgtcggagtctggatatcatgatatccatataaatgaaatacttttttcaatctgctttccaacgcaagtttcttaccacattctacgttatatatatcccgtactccctccggagtgtgtaatttcttcttcatatgtcctccaagtagtaatgttctttttggtactttagtgtgctaccatgttaaaaaatcactttgcattatacgcagtttcatccgttttgtcaagttcatcccgaagttccagatcaagattcagtgcatccagatacggaacatagcatccacggaaaaatttcataaaaaagcgctcatccagctcatcaaaacggaagctctttcgacccccgttctgcgcccgcatccaaaacttatacagttcttcaaaacgcatataatataagatatttctggaagaatagtagatcaggataaatgcgattccctgctgtttctcaaagttcttcataaactctacctgatgttcatgaatattctgaagcggaaatgtctccgccacacattcttttgcatcaaaacacaccggaattccctgtaccgctccaatatagtcgatcgtactgcgctgatcaaaataagcgagcgtgatctgtctgtgttctttatccatccgcaccggtgtgatcggggtcggaatcttctgcatcagtgccagattcttttccagataccactcattggtacggttgaccatatcttctaatgtagaacctctaaggcctctcgagttccatgttcccatgctgtctcctttatcagtttccagaaaacctccggtacctttgcataaaatgtctttccggaaagattctccagttctttcttcatccccggcattgtaagctgataagcatgcagtacctggtcttcgatcttccattcttttttatagcggtcattccatttcttagagccgtatttgtaatctccgagaagcggatgtccggtactcgccagatgtgcacggatctgatgggtacgtccggtgatcagatgtaccttcagaagcgtcatctcttcattccacgcgatcgggacatattctgtttctataggaaggccttttgcatctttggaaaagcctccctttgaaaggctgacacggttcgtcttctcgtctttcacaagataccccctgatgtgtgccggctccgtgatcctgccctttacaatacacagataatattttttcagtgtacgtttcttgaataattctcccatctgctgtaagcctgccagactcttcccggcaacgatcagaccgctggtattccggtccagacggttgcagatcgacgggcggaaggtcttaagattctctctggtgagctgcccggattccagaagatatgctgtcacattctccactaccgatacatctgtttccttcgccttctgcgacagcattccggacggtttattgataaatatcacattctgatcttcatagatcacgtccagcttcaccgtattctttatgctttcttccaccgtctttccagctgcctgaaatttggcaatggtatcatctgccaaaaacagtttcacgctgtctccttttttcagatgttcgttcccggttgctttctttccattcagcacaatattctttttacgcagcattttataaataaagcttcccggtgcttcgctcagatatttgcgcagcagtttatccaggcgttgtcccgcctcattgtcatgaatgatcagttctttcatattctcttctaactcccgctgttttctacatagaaatgtttaagatgatcttccggatctttttttctcttcgtaatgattctttctgttctaccgctgccatattattcatgccctccgcacgcgataaaaatgcagtatagtcatggaaaatcttcaccgtcatcttatcataatgattgtctttcaaaatatctttgatatgacgggcaagtgccgcctcatcggtcttcggattgcttgcatatccgcagacaatgtgcccggatacaaccactgcatccagaggcataaccttctgtgaactggtaatgatcatatcatatgccttcaggatcagaggtgctttttcctccagctcctggtattttgcttcttcaatactcttatatggtgccattgtgataaattccaccaacatctttgctgccggaaggcatccgactaccgctacaacggtaagcagattcagtctggatccggtctgaatatatccggttacaaagattgcgatcacaattgcaaattctacgaccgctcccagaagatatttctgttttcttgcctttacatatcccggctgtcctttttctgttctcatattgtctgtcctttttgttttctatttataatttttctgcaatcgtttttttctatcatgaaaaaaacatttttccaagctcatagacattccgtatatgcctttatatatccgcatggttgatcttcatcatcccccatacaagcaggcgatccggaaggatcttggaaaggattctggaacctttcattgctgctccatataccgaaacgcgtcttccacgcacgctgtctgtaagtgcctgtgtcaccaccgcttccggttcggcacagagtgcttctttttcacttgccgcaagcgcaccggcccggtcaaagaattctgtacgtaccggtcccggacacactgccgttaccaggattccccgtttcttcaattctgctgccagtccctgtgaaaaacgcagtacatatgctttggaagccgcatatacacagaatcccggctgtgcacagaacgaagctgccgaagccagattgacaatccggctgcctttcgacagatatggcaggcagattcctgtcattctggtgagtgctgtacaattcagatcaaccatgccgcactgttctttcaaatcaatgtcactgacgttaccgatctttccatatcctgccgcatttacaagcatccttacatctgcctgccggcgatccagttctctttgcagtttttcaaaaatatagtctctctgcatatccccgtcgaagatcctgaccgggatctttacctgttcctgcagatttttcagacggtctgtccgccttgccactacccataattcatccaggttcttatacagctgcgggatctgaagcgcaaattccctgcccattcccgacgatgctcctgtaacgatcgctattttcaactttaacacctctctacatccatccggctgccggtttttcatcattttccctttatgctatttctcttgctgttatttcttcttatgcacattccggatcgatttctttttctgtctgctgttctgtctgtcactttgcacagtatttcttctggaatgctcgtttttgtttttcccacggtcattccgtcccggttttccggaagacttctgattctgcgttttctgtcccggtactttctgctgtgatctgccttcgaattttctcgggcgtatcagacagtgtttatcaaatcctaccagatccatgcggtgtgccttcttcagagcctccatgaccagatcataattcttcggatcccggtactggatcagagctctctgcattgccttttcatgcggattcttcggcacatagaccggctgcatcgttcttggatccacgcctgtataatacatacacgtcgagatcgttgacggtgtcggatagaaatcctgtacctgttccggcatatatccaagatcccggatatgctctgctagttctaccgcatctttcattctggatcccggatgtgaagacatcagatacggcacaagatactgatctttgtggatcttctgattcatcttattgtactttttcacaaattcctgatatacactgttctctggttttcccatcagtgtaagaacatcatccgatacatgctccggtgcaacctttaactgtccgcttacatgataacggcagagttcctccagaaatgcatcacttttatccgcaacaacataatcgaaccggattcccgaacggatgaataccttcttcacttttggaatgtcacgcagttctttcagaagtttgatatagtctctgtgatctactttcagattcggacacggcttcgggaacaggcactggcggttcttacacacgccacgtgtaagctgtttttcgcaggatggctggcggaagttcgccgtcggacctcctacgtcgtggatatagcctttgaagtccttttcctgcgtaatcatcttcgcctcatctaacagcgactcgtggcttctcacctgcatgatccttccctgatggaaagtaagtgcacagaagctgcagccgccaaagcagccacggttgctgatcagactgaacttgacctctgagattgcaggtacgccgccgtccttctcataagaaggatggtaggtccgcatataaggcagtccgtagacatcgtccatttccccttccgaaagcggaagtgccggtggattctgtactacatacagatgagcattatatggctctaccagccttttcccggcaaatggatcggtattgcagtactgtgtataaaagcttcttgcatactccagcttatcctgcttcatatcttcgtatcccggaagaatctccgcgtcatagacactgtccagactcttcgtcttataaaccgttccagcgataaatgtgatatcactgaccgcaataccgctgtccagagcttctgcgatctcaatgatcgaatgttctcccattccataagatatcagatctgcaccggaatccagcaggatcgaacgttttaatttgtctgaccagtaatcataatgtgccagtcgtctgagacttgcctcaatccctccgaggatgatcggtgtcttcttatatacctgacggatcaggttactgtatacaaccgctgcgtaatccggacgctttcccatcacgcctcccggcgtataagcatccgttctgcggtgctttttcgacacggaataatgattcaccatcgaatccatatttcccgcagaaacaaggaatcccagtctcggttctccaaggatcgtaatgctgttcttatctttccagtccggctgcgcaatgataccgactttaaatccatgcgcttccagaagtctcgtaatgatcgcatgtccgaaagacggatggtctacataagcatctccggaaatatagacaaaatccagctgttcccatccccgttcttccatatcctttttgcaaatcggtaaaaatttattttctgacattctctatctcctcttctgtcagcagccggtattctccgggcttcagattttcatccaggcacagggttcccatgcgttctcgcttcagataagtaacttctttacccactgcaaggaacatccgcttcacctgatggaactttccttcatggatcgtaaggcggatctcagattcttccgcgctcttcataatgtcaagttttgcaggtcttgtcatctcttcttcctctgcgccgatatcgattccttctgcgaaccgctttacatcctcttctgtaaccattccatctatttttgcataatagactttatccacatgctttttcggtgccagcagacggtgtgccagatctccgtcattcgtgatcagaagtaatccttccgtatctttatccagtcgtccgaccgggaaaagatcctttcgtttcttgtctttgatcagatcgatcaccgtagtatctctccggtcctcggtcgccgataccacgccgcccggcttgttcagcatataatattcatacgacacataggaaatgttacggccgcctattgtaacttcatcgcatgtctcatcaatcttcgtatctgctgcttttaccaccgtcccgttaacggtaactttcccctgacggatctgcttctttacctcctggcgggtacccacacccatctctgccagatatttatccagacgcatcatcttaacacagcctccatcccggcagatatttgttcttcaatgtaccattcgatacctttccccatccaagcgggaatccgtctacacagaccagataccagccttttgcctttctctctgtcagatcatctacatccagcgtctcccctttcagataacgtctgactctttcatcttcgcatggaagatcaatgatctgtgcatattcatcctttttcaggcacatggcaaatgcctggctcggttcaaaacggttcttcttcagttctccaagcagcagtccggttcttaagaaacggattcctctcacatccggaagcccttccggcatatagtaaatgcgctctccatggatatccagtctggaaccatccagtttccatgttacctgtttcatgaattcttccagatctgccgggatttttcctgatttcttctttggtttcagctcttttgccggcaatggtgctcccttttgcagaagggcaacgtaatgtccctcccctttcatcttgtgcgggaagatgcggactgtttttttcagttcttcatccttttcttctgtcacttccggtattcccgggcagaatccctcatagttttccatcggaagtacatggaattccggatattcttttttcaggtgttcaatgattctctcattttcacttggatcaaatgtacacgtcgaatacagcatgagaccgcccggctttaacattcttgcagcctgcaggatgatatttctctgcagattactgaagaattccggtccgtgttcttcccatgcttttaccatctttttatcttttcggaacattccttctccggaacatggtgcatcgatcaggatcttgtcaaaatattccgtaaaataattctccagacgtcctggttcctcacttaacaccagaacatttccgattccgaatacctcaatattcttaagcagtcccttggctctcgaactgctgatatcgttggcaatcagcacgccttctccctgtaattttgctcctaattctgtcgcctttcctcccggagccgcacatacatccagaaccttatctcccggctctaccggaagacggttcgccggtgtcatggcactcggctcctgaagataataaaggccggcaaaataatacggatgctttgcaggagacactttgtccccgtcataatagaatccattttcgatccacgggatctttctaatctcaaacggacatatcttttcaaactcttctaccgagatcttgcctgtattcactcgcatgccataatatcttggttcttcataacaggcaatatattcgtcaaattcatctccgagaagtgcacgcatcttttcttcaaatgctgctggcagattcatatatttctcctccgtcgttattatttacaatttttaagtaccagtttcaggaattcccagcttctctgcgtagacgcaatatccagacgttcattataagaatgaatatccagaacatccggtccgcaggatacgcagtccagatccggacgttttccgaggaagattccacactccagtccaccgtggataatgcagatctccggctcttttccataaacttctttgtatgcttctaccatgaccggacggagttctgactgtggcttgtactgccatgcctgatattcgctggaaagcgaaccgcttcctccgaatgcttttgtcacagcctctacttcttccagcacctgctgctttctgctgtctactgcacttctgatcaggaatgctgcctccactccattttctttcatagataccacaccgagatttaaagaggtctctgtcgcgccggctactttacggctgtattcttttaatccattcgggcatgccgtcaggtatcctactactttttgcgtagtatcttttgagaacactactatattttctactttttcagtttctgtttttacagtcaggcctggttcttctcccatgaattctgcattccatatactttccatgtcccggatcatagcaaggatctcttcgcagtcttccggttctgcaaggatagacgcgtgtgcttccatcgcaataacgttgtctttcgagccgccatagatttcgctcagacggtaattcttctctcctgcaatatgatacagcagacgtgccatcatcttattcgcattaccacgttgtctgtggatttcttcgccggaatgtccgcccagaagcccctggatcgtaatcttgatcacctctccggatgcagtcttcttttctaccgggatcagtccctgataacggactccgcccgcacatccaaccgtcagagtcttctcttcttccgaatccaggttgatgagtttctttccttttaatactgacaggtcgatagcctcggcaccttccattccaagctcttcatctacagtaaatactgcttcgattggtggatgtggaatatcttcgctgtccatcagtgcaagcgccattgcaaccgcaactccgtcatctcctccaagcgtggtatctttcgcctttaaaaatccatcttctacatataattccagtccgtcatttttaaaatcatgtgtggaatccgatgtcttttcgcataccatatccatatgtccctgcaggattaccggttcactttcttcatatccaggtgttccaggctggaatatgatcacgttattcacttcatcctgaatcacttttaagtctctttcctttgcaaatgccaccagataatcactgatacgttttgtatcgcggcttcctctcgggatcgcacttatttcttcaaaaaaccggaagacttctttcggttctaattcatttaatactgccattttcctacactccttctatattacactgttatctattatctaacagtcttcataaaaaatcaaccttatccatacaatgaattaacaaggtcctccgggagattcctatgtccagacgtcatttccttaccattccgatactgatttttttcttatgtatgctgtcatttccacagacagtctttgccggtgccagttacggactcctcctgtggttccggcatgtccttcccacattacttccctatatggtcctgatcaatattctgatccgcacccctgcacttcactggatctgccacatcacatcaccgtttctatgtccgctccttggcacttcttattatggcacatttgcagtactcaccggcttcttatgcggatatccgatgggtgccaagacagcctccgaccttctggacgctcagaaaatttcgcgttcggaagcctcttaccttttgtctttctgcaacaatacaagccctgctttcatcttaaactatgttgtcattcagaatctgaaaaaggattctatttccattccgtttcttcttattcttacacttacgcctcttatgatgagctttgtctttcgtcttttctaccgcgcaaaagaccatatccatccattttcacacttgatgcaggtttcttcttcaactgcttcacagtctgaaaatttatccggtaattacttcgaccgttgtatcatgaatgcattcgaatccatcacaaaggtcggtggatatataatgatgttctctgtcctgattcaactgcttgcatctgctcttccagacaatacagcctctcttcttctgtattccagcctggagatcagcaccggaatccgacggcttgcgtcatccgcactgtatacctcccataagattattctgtgcgctgcacttacctctttcggcggctggtgctgtattgcccagacatattccatgatctccggcaatcacttaccaatcctgccctatatagcagaaaaactggccaccgcattggtaaccagtcttcttatctccgcttacatatatgctatttgattgtatcttaatccagtgtgtcatcttcctgaatatcataaccagaaactgacatatcattcggatactgattctcatcatccagataatcatcctgtccataagcatcctgctcataattattctgcggatattcttctgcaggatattcatcctgtggatactccgactgtacactctgttctgtctccggcggaacatccagctctgctctgttgttacgcaccatgtcataacattcctgaagagaatttacaagactgtcatacttcgatgtatacgtatccaaggtacgtccgatcgcactctctgcctgagaaagaagatcatctgtataatgaatggctccgatacgaatctggtttgcatcatttgttgcattatccagaatctgctgtgcctgtgcagttgctgcagttacgatctcatttgcctgcgcatacgcctgctgcatgatctcatgttcacttaccagctcatttgtctgaatctgtgcttcctgaatcattccgtctgcttttgcctgtgcatcagccagaattgcgtctttgttcgcaataatcttctgataacgcttgatctcatccggtgtcttcatacgaagttctcttaacagttcatccatctggtctttatttacaataatttttgttgtcgacagcggctggaatttacaactgtcaatatactcttcaatttcctctatgatctgctcaatacggctgctcataatatttacactctccttttatgtttcattttcccccagactttctgctctatgtaatccggcacaaactgggatatatctcctccgaaggctgccacttcttttaccgtggtagaactcaaatacgaatactgcagattcgtgatcagaaatatcgtctccacatctgacgcaagtttatgattggtctgcgccatctgtaattcatattcaaaatcagtgattgcccgaagtccccttattacaatcttcgcattcagcttatgggcaaaatccaccaataatccttcaaatggaataatcttaacatttggtatgtctttcgttacttcctttaacattttaacacgttcttctacggaaaacaacggggtttttgctttattattcagcactccgactaccagttcatctaccatttcagcagaacgttttatgatatccagatgtccgtatgtgaccgggtcaaagcttcccggatagattcctgttaacatatttctttccttcccgcaggttccaaaaatacatgcttatttgtcttatattctttttctttgataatgttatatccaagatcttctgcataatcaaagtctgtctctttagaagcctctacaataatgattccttcctctgccagcagcgatgattctgccagataagtcagcacacttttttccagttcatgattatatggtggatccataaaaatataatcaaactgtttttctccttctaatttatagagtgctgtcatcacatccatctgcatggtcatcccttttctttcaaaatgtgtcttctgaaggttctctttgacacacgccatggctttcggattcttctctacaaataccgcttccattgctcccctgctcagagcttcgatcccgatcccgccgcttccggcaaacagatccagaaagatactgtcgtacagatatggagcgatcatgttaaataatgtctccttgatcctgtctgttgttggtctggtatccatgccttccaacgtctttaactgtgttcttcttgcacttcctgcaatgactctcatattctatcccctctctttcctgtctgttccaagctttctgtaacggttcatacaggcatagatttcctgtatacgcggtcttgcaagatttcccggtacggtatttccttcgcacacaccggcaagcccttttttatccagaacgttctccacctgttctatggcctgtccaagtgtcttcctgccatcaaatatctcctcttccaggaaacgtacgatctgccccagtgtatttaactgctcactgtccacaagctgttccacataccgcagatcaatcgtctcatgaccgatcatgaccgcatcgcgtcccattgtttttaatttcaccctgcctttctggcggatgcccggattcttacgcaccttccggtcaaacgatggctgttccggcttttcttccggaaacttcaatgccggatagtctgaagccgcttcctttgccagttccgtgatttctctcggaacatacttatccatctgaatgatctgatccgcgatctggaaataggctccggagcttccagctaccagcaccgtcgatattccatattcctgataaagatcccgcacacgctcaataaacggtgtaatcggctccatgtcacggtggatcacctgctgcatcagctcatctctcaccataaaattcgttgcactcgtatcttcatcgatcagaaatacctgtgttcctgcttccatactttctatcacattcgccgcctgtgacgtacttccgcttgcatcttccgtgtcgaacgcatacgtatcttttccgttcggcagatcattgataaacatggaaatgtctgtatgccggatgcttctgccatcttctgcgcggatcttcattgcagtatcatctgtgactacatattccctgccatctcctgcaatatgaggatatacaccactctccagtgctttcaaaagcgttgatttaccatgatagccgccacctacaaccagagtgattccctttcgtattcccattccggtgagcacccctttatatggaagcttcatcgtaactttcatagaatccggcgagacaaacggcaccgcatccttcatcggtctctgggaaacgcccgattctctcggaaggatcgaaccgtcagcaacaaatgctatcagtccctcttttttcagctgttcccggatatattcctgatccacggcaagttctgccgcccgcttcactgcattctggtccatattcttataatacagggctttctccacacacgccggcagatactgatacagaatcttaatcagctctcctgcctggatcgtacgtcctcttgccgggaatccgacctcaaaccggacaataatattccctgtcttttcctctatctcacaggccgtacgttccagcacttcctgaccacatcgtgtcacctggatgatcccgctttttccggaaccatgtgcctgaaacgagtaccgttccagttgctttgcaaaattccgcagcagataatctgccacagccatctttttacatttgctgtcatatagatttcccggaatccgggccgctcttcctgccacctgtatatgcagcctggacggtgccgcaaacggatctccctgtacatgatcaatccccagtatatatgttccaaactggtatgcgcctctggtatccttatatgccggatatcctctgtgatcaatgcgctccagtatctgttttaaatcttctgatgtcttcatatttataatgttactgttcctttttattctctattctatcctttacagatctgtctttcttattcactattctctttctcgcagatctgcttttcttattcgcttctctctttcccgcagatctgcttctcttattcgcttctctggattctacagatccacaattcttgctctgtgatggatcgccggaagatacttctgaagcagatctttcgttttaaatttcaaatggctggtgttgattcccgggttgcagccgaaccattctgcctctgcaacttccttatctataattacctgcacataatcatcttcatcggtcagaagccctgcaacacttgctgatcccggtgttgtgccaagatgttccagcatcttctccggcggcgcaaatgacatatgggacacgcccagttttttactgaatgaagaagtgtcaaatgctttgtctgccggcattaccagcaaaaagaaggttgtcttcttctggttacagaggaagacattcttccggatctctgttccgatcgctttatccacttctgcacattcttccatcgaagatgccggatcattatccacctgttcatatggtatttttaatttttccaatgtatcgtagaatttccgctctaacggcattctttcgtctgccggtgctttcgttcttatttcactgatatacataacactaaacctccgtttccgatatttatacttgttaacattatatcgaatctgcacagtgattgcaatttttacattacaattttatccgttatgaatttctgtttttttcattctatgttatactatagttggtattttatatattttcaaaaggtcataaaggagaaaaaagacatgaaatacgtattagcatcagcttctcccagacggcaggagctgcttacccaggcaggattcacattcgacgtaatcccgtctgcagtcgatgaaaagatcaccaaagatattccgtccgatgtcgtgatggaactggcgcaccagaaagctcttgatgtatatgaatcaaagataaaagacaatcccgcatatcagggtgaagactgtatcgtcatcggtgccgacaccattgtgtcttatcgcggtgagattcttgggaaaccggcagataacgaagaagcctttgatatgctttccatgctcgcagaccgcacacatcaggtctataccggagttacatttgcagggtgtatccgtgggcagcagatcttacatacattctatgaaaaaacggatgtcaccttttatccagtcacaaaagaggatcttcatgcttatgttgacagcggtgattctcttgacaaagccggcgcttacggcatccagggcgcatttgccatccacgtaaaagggatcgaaggtgattataataatgtagtcggccttccgatcgcacgactctaccatgaacttgattccattttgccaaaggagaagatacattatgcattctagccggagtaaacagaaatacgaaaaatccgcactccgtatctccatcacaggaagtacgattttcgtaatcctggagatcgttatggcggtcatcacaaggtcgcaggccgtccttctggacagtgtctatgacggcgtcgagattctgatggtattcgtgtcactttcactggttccgctgatgtacaagccgtccagcgaaagccacccatttggttaccagcagattgaatccttatttgttgttgtaaaaggtgcgatcatgattgctgttaccgtcggactgatcattaacaacatccagatcatcttccacggcggccagcatgtcaacttttccatggttgcgtattttgaaatgagtgccaccttagtcagtattgctgtgatcttcctgcttcgcaggatgaacagtaaactgacttcaccgatcgtgatcatggagatccaggaatggcagatcgactctgtcgcatcgtttggtatgtgcatcgcattctttctgccgcagatcataaccggagaatggttccagcctttgattccttatctcgacccgatactggcgatcatcctgtccctttttatgcttccggttccgataaaaaccgtaatcacgggacttcgggacctgttcttactccctccggaggaagaaacggttcaggagatcaaagatatcgtatctccgattcttgccacatacggggacacaaaattatattatgatatcctgcgtaccggacggaaattatggatcagcgtgtatatcaccatgaaccgtgatatgatctctatttccaagttcaaatctgtgcagaaagagatcattcaggctctttcaaaagaatatcaggacttttattttgaactgcttccggacattgaatacaccggggatacagaggtccctgagcctgttcctgatgaagaagaaacttaatctgcaaaacctgccactagcagattttcttgtatactttggtatgcgtaagaggctgccggcaaaatcgccggcagcctctttttgaaggtagttctatgaatcaaaattgtggtaacgtctgaatcatttgtatttctgtatcttcttatatttatttacgcttacttgctttcgtattttgcggcagcatcttcgatagacgctctcatgatcagcatcagctcatcgatctgtttctttgttacgataagtggtggaatcatacggtttacgctgtctccgatggctgtgatcagtgccattctgttcaggcatccgtgttttacttctactgcgattggaatatcatattcgcatccaaccagaagtccacgtcctcttgcttcttttacatgtgggagttttgcaagttcctgtttcatgtattctcccatttcttttgcattttcacttaagttgttatcaagaatctctgttactgatgcaagacctgctgcacatgttacacagtgtccgccatatgtagagccatgtgttcctgctgtaaatgcttttgctactttttcagttgcacagcatgctgctaacggcattccgcctccgactgcttttgccatagatactgcgtctggttttacaccatatcccatgtaagccatcggtgctccggtacgtccccatcctgtctgaacttcatcaaacagaagtaacatatctttctcgtcacataatttacgaagtccttcgatgaattcctgtgttgcaggatgaacaccgccttcgccctgtacaggctcaatcatgattgcgattgtattctctgttacctttgatttgaaatcttcaaggttattatattctgcataatcgaatccaggaagcattggtttgaatcccatctgaattgcattgtccggctggcctgttgcagacattgctccgtaagttcttccatggaaaccatgttttgctgtaatgatgtgatatctttccggtccgaaattatctacaccatattttcttgccatcttgatcatacactcatttgcttcagttccggagttctgataaaagatcttatccattccgatcgtatcacagatcttcttagccagtaatgcctgtggaatggtgtatggatagttgaatgtatgcatgatatcatctaactgatccttgattgctgcaatgacttttggatttctgttaccacagctgttaacggcaaccccaccgtagaaatccagatatgcatttccttcttcatcgtacagatacatgccttctgctctctctgcaatgaaatcatatctctcataagtctccaccatatacttattaaccatgtccttcagttcttgtgctgtaagtcccgtatcctttaatctcataataaaactcctcactttcatccatcctaaaaatttgttgaataattatgatctcgttcgtcttcctatccttttatcactctatcaatagaacgaaaaaaggcaccacaccctaacgggtatggcgcctttgcctttcaacgattcacagtatatacctgtgttttgaaaacgtcaacatgttttttgaaaaattttcaaaaatatttttccagactgcttcgctaaagtgtgccaccggcggctttccagcatgctaagacacatatagaacctgtcactggcaggttctatcgcatactaaagtataaaaaatagagtgccatacgacactctatttctgcacatattagttatacttacgttttctagcagcttcagatttctttttgcgtcttacgcttggtttttcgtaatgttctcttttacgaatttcctgctgaataccagcctttgcacagtttcttttgaatctgcgtaaagcgctatctaacgattcgttttctttaacgattacatttgacatagactcacacctaacctcccctccagtcctatattgtgcatcatacgactgttcgggtatttttattgcactacatatgattataacatatttttttctcacgtcaacaactttcttccactttggaaaaaattgcaaaatttcgcgaattgacagtaaaattttatgcaagctgtccttctaatgcttcttttgcaaccttcagagcatcctctacacctgccggattcttaccgccggcctgcgccatattcggacgtccgccgccaccgccgccaactaatttggcaactgctttgatcaggttacctgcatgagctccctgtttcatagctccgtctgtagcggtagccatcaggcttactttaccatcattaacagaagcaagcaggatcacaccttcgcccagcttctcttttaactggtctccaagatcacgaaggccgttcatatctacaccttccaggcttgtagcaaggaatttcacaccttttacttcttctacctggttcattacatcacccatggcatcttttgcaagtttgctcttcaagctctctacttcgccctttaataccttattttcattcatcagatgagaaaccttctcttcgatgttttccggtgttgctttcagtaattttgcagtctcatgaagcttcttctcctgagcgctgtagtaatccagaagtcctttggatgtcagggcttcaatacggcgtactccggcagccacacctgtctcggacaggatcttgaatgccatgatgtttcctgtattctttacatgtgtaccaccacagaattcgatagagaaatcacccatacttacaacacgtacaatgtctccgtatttttctccgaacagagctgcagctcccgtcttcttagcctcttcgatcggcatatttttaattacaaccggaagattctcacggatcttctcatttacgatatcttcaaccttctgcagttcttctgccgtcatggcagagaaatgtgtaaagtcgaaacgcagtctctgtgcattattcagagatcctgcctgctctacgtgattgccaagtaccatacggagagctttctgaagcaaatgggttgcactgtggttgttctcagcaagtgcacggttctctttgtcaaccttcagagtcaccttgtcgccgactttgatcataccctttgtaacctggcctacatggccgaatttaccgcctgcaagcttcacaacatcttctacgacaaattcaccgtcttcggtacagatgatacctttatcagcttcctgtccacccattgttgcatagaatggagtcttggcaacgatgatcgtacccatatctccgtctgtcagtgcatctacaacttctgtctcgcttgtcatagctgtcacatcagattcaacctctaactgattatatccgacgaactcagaagataattctgcatccagctcatcatatacactggcatctttaccactgtagttgtgtgtaccgaatgttccttcggattttgcacgctgttctttctgtgcttcttcgaatcctttttcgtcataagtcagacccttttcttccagaatctcacttgtcagatcgatcgggaatccataagtatcataaagcttaaatgcgttctttccagagagaacagtctcaccattcttcttcatctcttcttccatgtctgcaagaatagaaagtccctggtcaattgtcttgttgaactgagcttcttctttggcgattacgttaaagataaagtctttcttttcttccagttccggatatccgtctttcgatccgtcaatgacagtctgtgcaagttttacaaggaatgctcccttgattccaagaagtcttccatgacggcatgcacggcggagaagacgtctcaatacatatccacgtccgctgtttgatggaaggataccgtctgagatcataaatgttactgaacggatgtggtctgtcagtactcggattgaagtatctgtgttatcatctttctgatattccacacctgccatgttacatacatggtctcttaaagcctttaatgtatcgatgtcgaacatagaatctacatcctgcacgatacatgccagacgttccagtcccatacctgtatcaatgttcttctgctctaattctgtatagttgttatgtccgtcattgtcaaactgtgtaaatacgttgttccagatctccatataacggtcacattcacatccgacggtacatccaggctgtccacatccgtatttttccccacggtcataatatacttctgaacatggtccgcaaggtcctgctccatgctcccagaagttatcttcctttccaaaacggaagattctctctgccgggattccaatctctttattccagatctcgaaggcctcatcgtcatcctggtaaatggatggatataatctatctggatccagtcctactacttctgtaaggaattcccatgtccagtgaattgcttcgtctttaaaatagtctccaaatgagaagttaccaagcatttcgaaaaatgtaccatgtcttgctgtctttcctacgttctcgatatctcctgtacggatacatttctgacaggtggtaacacgtcttctcggcggtatctcctgtcctgtaaaatatggtttcaatggtgccataccagagttgatcagtaacagactcttatcgttatgaggcactaatgagaaacttttcattgccagatgtcccttgctttcaaagaactcaagaaacattcttcttaattcgtttacgccatacttctgcataatttcctcctgctctacattcatgtatcaaatcagtataaatatttttatcaatactaacttttaattataaagagagacaggcgttttgtcaatcattacgcctgtctcttttaaacttaaatatgcataaaacgcgcataaaatatcgtcatgaacgacattccggattcttgttttctcattcggaaccctcttattttaactcaatctcaccgagttcctttggtggaagctgtttgctggatgctttcacaaattcctgtactttcttctgtgctttcggtaccggaatattcgttcctgctccggctacacatccgcccggacatcccattccttcgatcagacatccgttcattcttccgatcttcgccatagaaaggatcttcttacaatctgcaagaccttctgcatgttcgatctttacttccacacccggatagtattcattcacacatttttcaatcgcggatgcaacaccgcctgcaactgcatatccacgtcctacacctgttgcattatggaaagatgactctgcttcatattcggaaagatcaatttccttcgcatcgaacattccctgtaattcctcaaatgtcactacaaaatcaacatcacttcttacgcttctgcgcattgcttccagcttcttggccgcacatggtccgatgaatactacttttgcattcggatgttcttttttgatcgtacgtgcagtagcgaccataggcgtcagctcctgagacacttcatcgatcatatccgggaaatatttctttgccagcattgcccatgacggacagcaggatgtcagaaggaacggaagttctcccgttgtaaccttttccacataatggtgtgcctctgcaacagctccgatatcagctccaagagctacttcgtatacctgtgaaaatccaagttcttccagtgctgcctttaagtttctcgcattgatattatctccgaactgcccggtaaatgccggtgcgatctcagcaatgatctgctcgccttccgacaatgctcttgcaagctggaagatctgggatttgtctgaaattgctccaaacggacagtttaccatacacataccgcaggatacgcatttgtccggattgacatatgcacgtcccactttatcgttttcaatcgcattgacaccacaggcttttgcacaagggcgctctttcttggagattgcgtcatatggacagacactcttacattttccacatttgatacatttttcctgatcaatgtaggattttccgttcaccatggaaattgcacccttgggacagacttccatacaaggatgtgccagacatcctttgcacatgttgctgacctcatatcctttcgcctcacatctcatacatgcagacgggataacctgcataagcggcggctcataatatttgtctgatatgttacttgcttctactcccgctgtcagatgtaccggtttatcttcaggcctgagcgcaagtcccattgcaagtcttacctgctctcgtacaactgctcttgcacggtagacactgtcacggtactgttccgtctcatcattcaccagcgcatatgggattgcttccatatcgtcgcataaagtatccgcatccgctttgaaaccaagcgctgcgacttcttcaaagacttttcttctcaaccgtcttacggttgtattaatgcctctcatcatagttggagttcctcctgtttttcctttgtcatttttatgacagtctatagttctattatagacgcttgagaaaatcttatcaactaattttggggattaatttattaactgggttggcctttcggtccgggtatccaccagcctgttgaattaagtaccaatttacagcagaataatattatgctctctgcaagcctcccgcatctcttccggccacaaacttgcctgcacttcgccgacatgagcacggtcaagaagcagcatacagagtctggactgtccaataccgcctccgatggtgtatggaagttctccgtttaacagcatcttatgatatgggagattctttctctcttcgcatcctgcttttacaagctgctcttccagagctttttcatctacacggatacccatgctggagatctcaagtgcacagttcagtgtctcgaaccagaacaggatgtctccgtttaactgccagtcatcgtagtccggtgcacgtccgtcgtgcggctcgccgcttgcgagtttgtcaccgatcttcatcaggaatacacagccatgttcttttgtgatcagattttctctttcctttggagtcttatccggatacatgtcttccagttcctgggaagtgatgaaatagatgtcctccggaagtttctttactgcctgtggatatttgtaccatacctcatgttccatatgtttgatgatcttgaaaatattacgtacggtagtttccagtgtctcaacagtacgttcttcttttttgatcactttttcccagtcccactggtccacgtagcaggaatgtaagttgtcaagttcttcatctctgcggatcgcgttcatatttgtataaagtccttcacccggctggaatccgtatttgtataatgccatacgtttccattttgcaagggaatgtacaacttcgattgtctctcccggaacgcctgcgatatcgaactgtaccggtctttccacaccgttcaggtcatcgttcaggccactgcttttttctacaaataacggtgcagagattctctccagattcatctcttttccgaattccttctggaacgtgtcacgaatgtacttgattgcttcctgtgtctctcttacgcttaagcgagggtcataatgttctggtaatattaatcccattttttctgtctcctttttgtctgttgtatatttttatgaaattctttgctcactgattactcttctccaaatactctctgtgcataatatacggactgcattgcatctttgccgtaaaaatctgccccgatcatatctgcataatcctgattcagcacagctccccctaccatgactttacattcaggtttacgttctctcaataacttgatggtctcttccatgcttacaaccgttgttgtcataagcgcacttaaacctaccagccggatatcctgctcaactgcagtatctacgatcacttccggcggtacatctttccccagatcgatcacatcaaaactgtaattctccagaaggacttttacaatgttcttaccaatatcgtgaatatctccttttaccgttgcgagaataactttattcttcgcctggacttccccgccttcctgtgcgagtacgtccttgatcactgcaaatgcgatcttcgccgcatctgcactcatcagaagctgcggcaggaagacagttcccttttcaaatccttttcccaccgtatccagtgccgggatcaggtgttcattgatgatctccagcggtgcatgttcctttaacagttctcctgttgcatgatgtgcttcttctttcagacctttttcgatggcctcttttaaagtcagttctgccttggctgccggtgcaggcgttcctgctttctgactgccatatacacggatataatcctcgcagttcttgtcgtaattcatcagcgcacagaatgaatagtaagaacacatcatatcttccgaagacggattgatgattccggcacttaagccattctgcatggccatcgtatagaaattcgaattgactgccggacggtacggaagtccgaatgaaatgttcgatacaccaagtaccgtacatacaccgtaagtctctctgacttttttcagtgcttccaaagtgacctttgctccttccggctcggaactgatcgtcattgccagcacatcgattacaatgtcctttttgtcaatgccatattttttcgcttcttcgatgatctttcctgccacacggactcttccatctgccgttgccgggattccatcctcgtcgatcgtaagcccgatcacaacacctccgtaacgcttaataagcgggaagacagcatccatattttcctgttttccatttacagagttcaccatcggcttaccgttatagatacgcatcgccgcttccattgctgtgatatcaacggtatcgatctgaagcggcaggcttgatacgctctgaagctccatgatgacttctttcatcatcgccggttcgtcaatatccggaagtcctacgttgacatccagaatatgtgctcccttatcctgctgcgtaatcccctctttcaggatataatccatgtcgtggtcttttaatgcctgtttgaatttcttcttaccggtcggattgattctctctccgatgatcatcggcttgccgccaaggatgaccgcatgtccgtaagaagataccattgtgatatctttctttgttgccggctttacgctcatctctctggtcgtctcaaccatcttctggatatgtgcaggtgttgttccacagcatccgccgatcacatgcgctcccatctctacgatctttgccatatatccggcaaactgttccggttctacatcataatagacttctccgtcacgctgcttcggaagtcctgcattcggttttacgatgatcggaaccgatgcgtatttcagaatatcctccagaatcggaagcatctgctccggtcccataccacagttgattcccaatgcatctacacgaaggccttccaacatggtaaccaccgccggaacatctcctcctgtcaggagttttcccttttcatcgaagatcatagttgcaaataccggaagtgaagtattctcttttgcagcaagtactgctgctttcacttcgtaactgtcactcatggtctcgatatggatcagatcagctcctgcctgttctccatagatcatcgtttctttaaatgcatcatatgcatcttcaaacgaaagatctcccattggctttaataacttaccggttggtcctacatctaatgctacataagtctttcttccgtcgtgcacgccacgttctgcagccttttttgcattctggattcctgctgttacgatttctttgagtccatacttggaatcatggaatttgatcgcattagcaccaaatgtattacttaagacgatatcactgcctgcctcaaaatatgccttatggatatcgatgatttcttctgcatgttccaggttccagacttccgggagttctcccggctgtaatccctttgactgaagaagtgttcccattccaccgtcaaagtacaataattcttttcccagtcgttctaataacatttgtctgctcctatcctctttcttgtatcttatgatctgcggtatgcgcagtctttcttctgacacacctcacaacctttgatatggcaggaagtctctgtttcactgagaccgatcactgccgtcaccgattttgacggtgtcagcatattgccgccggtaagtgtcagcccaatcttctttgccgtatccagcatacggaggatcatatcctgatgtgcaatatcaaagtctccatatccaggactgaatctcggtctgatataataaccctctttcttcatatctgcttccagagcagtctgccattcatccagatattcttccagcatagcagccgcacacgcctgaagtgttaccactcttgccatatctccgatggaatatttccgcaatagcagatcaactttcggtccaagcgttgcacccagcagcactgcttttttacatcccgtcagatttttataaagatttttactgtggatatccagatttcccagaaggattcttccactctccgggaattctaattcaaaaatgcggtagacgatcctgccgcacgccgcctgggaaagctcttcaaaacagctttccacaagcttcagcgtatgatcatctaccgcatgtctgccatatcccaagtaacgaattgcttctttcgttcttgcgtccattttgcttcctctatttattcagaatctctgaaagatttgcctggattgccgcagcaacctccggtttattcatagaatatacgtgaacatggttaatgccatttgcgaacagatcgatgatctggtctgtcgcatacgcaatacctgcctgctgcattgctttcggattatctccaaagcgatctacgattgctttgaatctctccggaaggttggttccggacatagacaggattctctttacctgatttgcatttgttaccggcatgattcccggaataaccggaacggtaacacccttttctctcgctctatagaggaaattataaagaatattgttatcaaaaaacatctgtgtagtcaggaaatctacaccacagtctactttctgtttcagatgtgcaatatcatccttcttatgttcggactctacatgtccttccggataacatgcagccccgatgcagaaatctccctgactcttgatatcctcgatcagctcatatgcatactgataatgattcggaagtgggaattcactctcttgtggaatatctcctctgagagcaaggatattctcaattcctgctgcctttaactgatcgattacctgatgcacttcttcttttgttgatgatacacaagtaagatgtgcaaggcttggtacattatatttatctttgatatgtgatgcaatctttacagtattcttactggtaccgccgcctgcaccatatgtaacactcatatatgacggtttcaattctgcaattgcttctgtcgcctttaatactccttcatatgctgcatctgtcttcggaggaaatacctcaaaagaaagatgcggtgtcttttctactaatatatcactgattttcatattttttctgtcattctcctttagtctgtttttacattccttcgtataattcttcgtactgttttgcagaattcttccatgagaagtctttattcatggcacgttcaacaatcttgttccagtcacgtttcttatcgtaatagatctgttctgcataacgtacagttgccagcatctcatgtgcattgtagttcatgaagctgaatcctgtaccagtcttttcatactcattgtatggttctactgtatctttcagaccgcctgtctcacggacgatcggaactgttccgtaacgtaaactcatcaactggctgagtccgcatggttcaaacagtgacggcataaggaatgcatcacaggacgcatagatcttatgagacattgcttctgaataataaatgtttgcagatacttttccaggatatttccatgcgaaatggcggaacatattctcatactgttcttctcctgtaccaagcgctacgatctgtactgcatcctgacacagttcatccattacatatgcaacaagatcaaatcccttctgatctgtcagtctggatacgataccgatcatcatagttttatgattctcttccagaccaagttccttctgaagtgcgatcttgttcttgatcttctctttacggaaattgctgacatcataatttctctcgatcttattgtctgtcagtggattataatcttcataatcaattccgttcacaattccagacaggcagtttgctcttgcattcataagaccgtccagtttctcgccatagaatggtgtcttaatttcctctgcataagagttacttaccgtcgttactctgtccgcatatacgattccacccttcaggtagtttgcatccttgtatgcttccagcttatccggtgcgaaataatactgtggtaatccggtaatgtctctgacacgcttcggatcccatgtcccctggaacttcaggttatgtatagtcatcaccgtcttgattccacggtaaaattcattgccatatctgaaattatccagatagatcggaaccagtcctgtctgccagtcatggcagtgaatgatgtctggtctgaaatcgatcagtggaagtgcacttaatacagcttttgagaagaatgcgaatttctcaatatccgcatacatatcaccgtatggtgcatatccgttaaagtaatattcgttatctataaaataaaacttaattccgtcgtattccatttcaagaacgccaacatactgttttctccagttcaagtccatataaaaatgagtatgatactgaagtttttctttccattcgtctttcatgcacatatactttggaagcatcacgcgcacatcgtatttttctttatcaaaatatttcggcaatgatccgacaacatcggcaagtcctcctgttttgataaatgggactgactcagatgccgcaaataatattttcttcattgcatttccctcccaaccttagaatactttatcattataacgtatttttattcagaataaaagggttgtttagcggtttttattttccagtcggatcgtatctgcgatcaatgctataaattctgaatttgtaggttttccctttccattacttactgtatatccaaataactcatccagcgtatcaagctttccacggctccatgcaacttcgattgcgtgacgaattgctctttccactctgcttgccgttgtctgatgcatcttggcaattgtaggatacaaaaccttcgtaatcgcattcaacacatccatatcatccactgccataatgatcgcatcccgcagataatgatatccttttatgtgcgccggtattccgatttcatggatcatatccgtcacacgggtctctagattatattcttgctttttggaaactgcattccggctttcggattccgaactgttctttctctccccgtttcccgcatctttgatcctgcttaagatcatatcattgtgaaatggtttcatcacatagtaacttgctccttttcggaaggcatcttctgtaattctttcctgtccgacagctgtcacgataataaattccggtcgtttggtaatctgctcatccatatttactttttccatcacacttaatccatccatctttggcatgatcagatccagtaatacaacatccggtttcttttctttgatcagatgatagatatcttcaccgttatcagcttttcctatcagattcaaatcctggtcttgctctatgatttcacccagcatatccaaaattctttcattgtcgtcagcgattgctacattaacttctctcattttacgtaatgcctccttgtcccttaataattatgtcgagttttattatatattttcctcaattttcgaacaagaaaatactgtcgtaaaaacatgacccacatcgacaaaattctgattattctacatatttcagcatattttcgataaaaatcccataacccctcgttggatcactgacaaatacatgggtaaccgcacccgctatctttccattctggataattggtgttcccgacattccctgaatgattccgcctgtaatttccagcaattttggatctgtcacttctatttcgagtcctttattttcctctctggtatgtttgtcaatttttgtaatacgaattttatactcttttacttttccttccacacagcatcggatttttgcatctcctttttttatttcatccgtctgcattatctccatcggatccgtgtcctgaaacaggttttctgtgcggtcaagcgttccaaaaatcccacaatccgtatttttatcaatttttccaagcacattatatctgttataaacaatgattccttcaatgcctcctggattaccgtcaattcctttctggatacttcgtatactggtttcgtatactcttccatttcgaatctccataagtgcattcgtatctgtgtcatgaattccatgtccaagtgctccaaatctgctgtcagaattaagaaatgttactgttccaagtccctgtgcattgtcccttacccatatcccgagcatgcaattattttttttgctcctgaccggttttaccttcacttccagatattccgaatctctgcgcagctttaaaatcacatctgttccatctgtagtttttaatatcgtctgtagttcttttttatccctgatcttcgttccattgcattctacgatataatcaccggcctttaccagatgtcttgccggttccagtcgttcaccgtctgttcctgtaaccttctctgttccaagaaccatgactccttctgtttccagatagattccgattggcatacctcccgggatcaccgtattgtcagacaccgtccccgcgcttacttcctctttttcgttacgttccattttttccttcactgaatatcccgtgtaaaaaaagacagaaaaaacaagtgttatgatcagacattttcgataccaatattttctcatgttccacacctcaaaaaaaagatagacatccctgcaagaatgtctatcttagtatgtggtattttataaaaaatactctggatctgtatactttttattttatctgacctgccagatttttcatctcttttgcgctttggatcacggtatctgtaatttttgcaccgccgagaatccttgccagctcttctaccgacttttcttctgtcagcggataaatgtgtgtacgcgtcactgcatcctctgtctttttttcaatcaggaaatgctgatctgccatcgctgcaatctgtgcaagatgtgtaatacagatcacctgatgttcttttccaatcaatgccatcttttccgacactttctgtgccgtacgtccgctgataccaacatcaatttcatcaaagatcagtgtctcaatctcatctttatctgccattacagttttgatcgccagcatgattctggaaagctcaccaccggaagcaacttctgtcaatggtttcacctgctgtccctggttgagcgaaatacggaattctgcatcatcaataccatctttggaatattctttcttttccgcaaaatgtatctcaaactgcacctgttcaaaattcaggtcttccaagcctttctggatcttcttttccagcatgtttgccttcttctttcgaagagtcgaaagtttctgtgcccttttaagataatcctgttccaactgctcacaggatgctttcaattcctgcatatacgcatcatagttttccagaatttcaattctttcttcctgcttcttacagtaatccatgatcttttcatacgagttaccatatttcgtcttcagatgattgatctcatttaaccgtttttctgtttcataaaactcttcatccgaaaattcacagtttttctgatactccgccagttcgtgattgaaatcatttaacagattatctacatccgcaagctgcgaatataactgcgcaagctgctcatcagcatctgaaacttccgacagggttctaagtgcccttccgagcttttcgcttgcgctttccccatctccgcctgtatactgatagctttcggtcacgctctggacaatccgctttccattgcacatacgacggtaaagtgactccagctcttcgtcctcatgctcttttaattctgcctgcacgatctcatcgacttcgaactgtaaaaatgccagttctttcgccctttcggattcatctgctcctgcctctgacagttctttttgtttttctttgtactgccgccatatctctacgactttttctttctgtctcttcgtctcttcacctgcaaaagcatcaacgatcgccagatgattctttttataaagcagtgactgatgttcatgctgtccgtgaatatcgatcaaaatcgatgatactgctttaagtgtcgccatctgtactgtctcgccattgatcttgctgacacttcttccttccatcagtcttctctgcagtgtaataaacccatcttccgggtaaatatctagttcttttaatttacggatctgccgttcattttccactgaaaatgtcagctccaccaatccgtatctcgctccctggcgaagaatgtctttcgtgtatcttccgccaagagcaagattgaccgagcctagaatgattgacttcccggcaccggtctctcctgttaatatgttcagccctctgccaaactctacttcgatttcatcgatcaaagccaggtttttcacatgcaaatattgtaacatgcatcctcctataagataatcttgctgatcttgtccattacttttaccgtgtcatccacgcttcgtattgcacacataatcgtgtcatctcccgcaatacttccgacaatttcattccatttcattgcatccagtgccgcacatacagcacttgccattccggccactgtcttgatcaccagaatattctgtgccatatccatagacagatacccttctcttaaaacacggatatatttctcactcattccattctcattatgctggtgcagtgcatatctctgttttccattttctgaaggtatctttgtaagtttcaggtcacggatatctctggataccgttgcctgagtaactttgaatccctcctggttcagatattccgccagttcttcctgcgtttcaatatgatatttattaatcaattcaataatcttcgcatgtctgttaactttcatatcatcaatttcccttcatctttctccgtaatatttccaaaaaactgattttattaatcttcatgatttttgtcgactcttttgccttgcaaatggtcagacgatctcctgtctcaagcggcacgctggtcgcaccgtcaaatgtaaccagtactttttctatattgcctctgcgtccttctccgatctcaatcacgatctcatcgtcggaagacagaacaatgcttcttgtgttcaacgcatgagaacagattggtgtgatcacagtaagagacgccgtaggttctacgatcggacctcccgccgacatattatatgctgtagaaccggttggtgtggaaatgatgattccatccgcttcataggaattcaacagttccccgtttacgaacaatttaaaatatataatacgcagatcatcacctttacgtgacacaacaatatcattaagtgcaacatctttctttccgttcggaaacatgccttccagcatcatacgctcttcatacagataatcacctttcagcatctgtgtgatatcttctgccagattgcttacctctacctctgtaagatacccaagcgttcccatgttgatacccagaatcggaacgtctcttttccagagcgttcttgccacttcaatcaaactcccgtcaccgccaatcacgattgcacaatcgatcatgtccggaatccgttccctgataatatttttctctgcatctttttcacacaatatacagcttcttcccgctatctccagtaattcctttactttttccgtcaccgcatgattcgtatcttttccatcatttgtaacgatccaaaacttttttaacatctgtctctaacctttcgcaagtgtcgcaaatgactgatctaccgtcttttcgacatcaatctcaggcgaaattctgtcagtcgcttcgcatttctgtaagtggaccagatattcgatattaccttccggtcctttgatcggagaaaattccagattcagcacttcaaatccgatagacattgcataatcaatcactttatggatgacttctatatgcgtacttttttcgcgtacaacgccttttttcccaaccttttctcttcccgcttcaaactgtggcttgatcaatgcaactatctgtccgtcttccgtaagataattacgaatcggaagtaacacttttgtaagcgaaataaatgatacatcaatagatgaaaactgtaccggttctccaatgtcttccggtgtgacataacgaatgttcgttttttccatacatacaactcgtggatcctgtctgagtttccagtcaagctgtccgcggcccacatcaatcgcaaatactttcacagcaccattctgcaacatacagtccgtaaagcctcctgtagaagagcctacatctgtacatacctttccttctacactgacatcaaaattcttgatcgctttttccagtttcagaccgccgcggctgacatatggaagagtatgacctcgcacttcgatcgtcgcttcttccggaaatgtagttcctgccttatcttctttctgtccgtctacatatacgatcccggacataatgattgcctttgccttttctctggaagccgccagatttctttttacaagtaatacatctaatcgttctttcataatttctcctgttatctacattgtctcatacatcttacagatctgtgccgtcatggattctacgtccagaccagtctctttgcgcaggacatctacattaccatgttctacataatcatccgggagtgccagaatctgcactctcacatctgcaccggtcctcatcagatattcacttacatgttctccaaatcctccggattttacgttttcttcaatcgtaacaatcaaccgatgcttctttgtaagccggtccagcatcttggcatctaacggttttataaatctcgcattaataagcgagcagtcatagcctttctcttttaaatcttctcttaccttcagtgcctcttcaaacatatgccctacgaaaataattgcaatatcactttcttcatacaatatctcactttttccgtattcaatcggacttctgaattccggacagacatcacatgcactccccctcggatagcggatcgcgatcggtccatcatatgagataccaaatctcaccatatccgccagttcccatttgtgttttggtgacatgattaccatgttcgggatactgctcagataagacagatcaaaaattccctgatgtgtctctccgtcattgcctactaatcccgctctgtccacggcaaacatcacaggaagattctgaagtgccacatcatgaatcatctgatcataagctctttgaaggaaagaagaatataccgaaaataccggtttcatcccgcctgccgcaagtcctgccgcaaatgtcactgcatgttcttccgcaatccccacatcaaaaaagcggttcggatatttctttcggaatctcgcaagacccgttccatctgccattgctgcagtgatcgccgcaagtttatcatttcttgccgcttcatcacacattacttttccaaatacatctgtatatgaatcttttttcttcggtttttccggttcaccggtctctacctggaacggtccgatcccatggaatttatccggctgttcttctgccggttcatatccttttccttttttggtaaggacatgcaataacacaggtccctcaatcttccttgcttcttttaatgcacgtaccaacattggtatgctgtgtccctgaatcggtcccagatatgtaattcccatatcttcaaaaaacattcctggtacgatcagctgcttcagactgcttttcgtcttacggatatgttcaatcataggatctcctacaaccggtacattatgaagcatattcgttacaccttttttcaaatctgtataaaaatctgcagtacgaagcttcgccagataatccgacattccacctacgttttcggaaatcgacatatgattatcattcaaaacaataataaaattcttcttaagccttgaagcattgttcaaagcttcataagccatacctccggtcagagaaccatccccgatcacagagatcacactgtaatcttctttttgcagatctcttgcacatacatatccaagccctgcagaaatagaagtcgagctgtgtcccgtgtcaaatgcatcgcatgcactttcctttctcttcgggaatccgctcattccaccatattttctcaggtcatcaaatccatcttttctaccggtcaggatcttatgcgtataagactgatgtccgacatcccatataatcttatctttcggaagatcaaaaaccagatgtattgccatcgtaagctctaccacgccaagatttgatgcaagatggccaccggtcctgctaatcttttcgatcagaaactgtcggatttcctgtgccagttccggcagttcctccggtgccagtttttttatatcatttgctttttgaattctttctaacataaccaggtatcccctctatctgtctctgtggatcaactgtatcagcagttgttccagatattcattctcccctgaaagctggtgaagcagatctattgcctgattggataattcttctactcttttttgtgcctgctcaattcccagaagtgttacatatgttgtcttctgatttttttcatcactgtggattggttttcccagtacttcttccgtactggtcacgtccaggatatcatcctgaatctggaatgcaatgcccacataatgtgctatcttttcgacctttcgtacatcctcttcttctgcccctccgagaattgcaccaatcatcatagcacattcgatcagcgctcctgtcttcaactcataaatcgtatccagaacatctttcggcacagcatgtcctgtttcttttacatcgatcacctgtccgccgatcattccatagacacctgcttttctgccaaggacactaagggcacgtccgattttaaggctctcctgcggtgctgtctcaaacgcacgaaatgctgtctcaaacgcataatttaaaagtgcatcccctgccagtatccccatatcttctccatagacaatatgtgtagtctttctgcctctgcgatattcatcgttgtccatcgcaggaagatcatcatgaaccagagaatacgtatgaatcatttcaagcgccgccataaatggacaaagtgcttctgtttcatcgccaaataatctgctggtctctctcattaacattggccgcagtctttttccccctgccatcagactgtattccatagcttccatgatcaccttctgatacccttccggttttggaagatattctttcaggatttcttcaatttcggctactttccttttcatctgtactgtaaattcttctttagaattcatgttcctcaccctcttcatccagtaacagcatcttcttttctaccttatcgattttactgttacatgctttcagcatatccataccctgatgatacaaccggaaagattcctccagcgaaatctccccgtcttccatctcttttatcgtctgttccagatctgagaaaatctcctcaaggctctggtcttccaaagattgttcctttttttctgccattgcatttctcccggtatctgtctgttatcttaataatccttatattttatatgtctttttctgcacagctttaacagatgtacggatgagtccatccgttacatatactgtcagctcatcacccatttccacctgacggatactctttacaacaccaccgtctgcttcttccacataggcaaagccctggttcagctttctgaccggagacaatccattcagcttttcaatctgaatcgccaggcgatgtcttgcttcttttacccggtctctcatcagcgttcgaagttcctcttccagttctatcagtctttgctgttgatcctgcagtttgtgacgtggatgcagataagaaagcctcacatccaattctttcagtcgtaaccggtttatacgaatcgttcctgtcatgctccgattcattctcaatctgcattcatccagatatccctgtaactgtctgtaatcccagactgcaagttctgccgccgccgaaggtgtcggtgcacgcagatctgccacataatctgcaattgtcacatctgtctcatggcccactgccgatatcacaggaacctgacagtcaaaaattgcccttgccacgcactcatcgttaaatgcccacagatcttcgatcgagcctcctcctcttccgacaatgatcacgtctacattttttgtctccagcatacggattccacgcacgattgattctttcgctccctctccctgtacctgtgccggatacagaagtaactgtacatacggattacgtcttgcagatatattcatgatatcccggactgccgctcctgtcggtgcagtcactacgccgattcgcttcgcatatctcggaattgctttcttatattccggtgcaaacattcccatctcttccagttcctgcttcagcatctggtatttctcataaagtgtgccttctccgtccagacggatctcctgcgcatagagctgataagagcctgttctttcgtagacattcaccgaaccaagtacaatgatctgctgtccttctctcatatgaaaagagagcccgcctcgctgccccgcaaacatgacacaggcaatcgttccggactcatcctttaatgagaaatatatatgtcccgatgtgtgatacttacagttagagacttctccttttacatagatacggttcagcataaagtcctgggtgaacatattctttatataagaattcacctgttttactgtatatacatttcgagccattctctacctctgattaatctgcaagttttgccagtactccatttacaaatgatgcaccgtcttcactgctgtatttctttgcaagattgacagcttcgttgatcgcaacacctgtcggaacgtcctcgtcccacttcatctcgtagactgcaagtcttaagattgtaagatctaccttattcatacggccagtcttccatcctgttgtatgttcattgatcaatgtgtcgatctcatcaatcttctctataatcttctgtgctttctggctgatatactgcatatctttttccgtggcaccttcaatctgctccaaatacagttctgtctgcgttccctgttctgactcttcattaaaatcagcaccaaatattaacttaaagatatgttctctctgctctgttctcttcacttatgcttcctccggtatctcgactccggcaacacgaatattcacatctgccacctcaagtcctgtcatgttctcaattgcagtttttactttttcctgcactttagaagtaatctcttttatgctgtatccataattaagatttaatgccagggatacagttacaatgccatccagtacatctacctttacacccttggataaagacttcattccaagtttgctgatcagttctcttgttgcattacctgccatagaagcaacaccttctacttccattgctgcaagacctgcaataatagctacaacttcatctgcaatctttacttctccaagattttcatctgtttttattgtatacgtattcttttcttctttactcatcttttcagaaacctcccgtctggtttttcactgtcttttattataacaaacttacatacatttgaaaacccccagtcagcctgggagttttatttctgtttatatttttatgatctgccaaattccgtaagttttaatccatcatttctgtctatcgtcatacggatactccattcattcacgaacagcagtaatggatggcctttcagatctttaactttcttcatatctgaagttcctgtcagcttatccagatcaatctcttcattttcaatccagcggatgtactcatacggaagattttccagacggatctctacattatattcgttctccagacggtatttcaacacatcaaactgaagtacgccgacaacaccgacgatgatttcttccataccagtattgtattcctggaaaatctggatcgcaccttcctgtgcgatctggttgattcctttgataaactgctttctcttcatcgtatcaacctgacgtacacgtgcaaaatgctccggtgcaaatgtcgggattccttcgtatgtgaatttgtcctgtgctgtcgtcaatgtatctccgattgagaagatccccggatcaaatacaccgataatatctccgccataagctttactgatcatcttacgctcacttgccatcatctgctgtggctgggaaagacgtactttcttgccaccctgcatatgatatacatccataccggcttcgaattctccggagcagatacgcatgaatgcaattctgtctcggtgagccttgttcatattggcctgaatcttgaatacaaaagctgagaaatctccctcttccatcggatcgatcggacctctgtcagatattctcggaagcggtgaggtcgtcatctgaagaaaatgctgaaggaatgtctctacaccaaagttcgtaagagcggaaccgaagaagaccggcgaaagttctcctttgcttaccagttcctgatcaaattctgctccggcaccgtcctgaagttcaatctcctcttccagctgtaatttctggtcatctgtaataagccaggaaatctccggatcattgatatcgaccttctttacctctccctgagttgttccttttttcgtatcggaaaagatctcaacttttttagatgctctgtcatatactcccttgaattctttaccggaaccgattggccagttgatcggacatgtggcgattccaagttcattttcaatatcatcaagaagttcaaatgtatccattgcctcacggtccatcttgttaatgaatgtgaagatcggaatatggcgcatcgtacatactttgaacagctttcttgtctgcgcctcgacacccttggatgcgtcaatgaccatcactgcggaatctgccgccatcaatgtacggtacgtatcttccgagaagtcctgatgtcccggtgtatccagaatattgatacagtatccgtcataattaaactgcagtacagaagaagtaaccgaaatacctctttctttttcaatctccatccagtcagaaaccgcatgctttgcagttgcctttccttttacgcttcccgcctgattgatggcacctccgtagagaaggaacttctctgtcagtgtcgtcttacctgcatcgggatgtgagataattgcaaatgttcttcttttctttatctgattctttacttcattcgtaatctgtgacatatattatacactcctaatttatagtatatccgtttataggcactattagtcagtataacatatgtctataaaatgctcaaatacatttttcctgtattttcaaggttttcctgtgtttttagataattacttcgaatctgcattcactggattgatcacaatattctgcgctgccacgcccgtctttcttgtcacaatgtcctcgatctgcgcccggttcgcatcacttaattccgaagcacctacgatcacatctgcctgatcatccgtaatacttaccacagaatcgttaaatccttttgccgcgagcagtgattctgctgccgcttctttttctgcgatttctgtcatctgtaccatctggttcactgcattttctttctctgcatcactaagattcttattgtcgataatgctctgtaatgtctctttattcttggagcgtacctgttccctgctcaccttcgcctgtgctgccacagaacttaccgttccgttggcgaggactgcttccccaggcgtcccgtctacactgccgtcatctgtactgctggcattaccgtctgtgctgccagtatctccatcctgacttttaatatccccagatgatacagatgtatcttcatcagaaatatctaataattccttatttgcaagttccgaatttgtttcctgtgttttcgtcttacctgggaataatttgccagagtaattcatataccctgctgccgcgatcattactgccagcattgcaatcacaatctgattcttttttgcgatctttttcactatcttgccctcctgctctttcatactgctcttaatttgtctgctttttcattattctaatcttatgcggttcaatatcaaataatgcctggaccgcactgctgatattttcttttactactgcattttccccaccgtctgcgatcactaccacaccttcgatcttgggacttagttccttactcacatacggggatccacttccttgactgttgctttcactgtccgtcctatacaccgtattttcttttttggatgtctttgacgactgtctggtccctccctggctgtcttcttccgtcactgtttcctgatccgattccgtatccttatccagtaccttttccgccgaagatttcagcgtgatcatcacctttacttctccggctccttcaatctgcgataaggttcggctcaggcggtcttccagataagctgtatacgcttcctcatccgttccggcagatgtcccgtttactgatttttctgtattatcgttcgatgcggacgacatattttcctttttctttcctgctgggactgcaatcaccatcagaagaattcctgtaaggagcaggatcagaagctgatcttttcttagattttttaatgagaactttttccagtttccaagtttatttgaaaataaatcactcagattctttgccaatttcaatctgctccacctcgattctcctgttctggcttacattttcatctgaactcctgtctgtgttcaaatcttgtatctgatcctctgtattctggctgcccgtacccgaattttctatgttttgattctctacgttctgtccatctatatcgagaatatcttcctgaactttctgacttttttcttccagttcactggtccgaatcttatatgcactatcatgataaatctcttcaaatgcggctctcttatcaaacaattccagtaccggtacaaccagcattgccgccagaatcagtcccaggacaaagcggacatatttttggaatccatgatccggtatcatctgcaggatcacgcttccaagcacggcaaaaaatgataatttcaagatccagttataaatcatctccatctgttccgctccttcccggtcatgcatttgttaccgccgccacgattgcgatcgtcagcagaaataacactcccacggtaaatacaatctgcagcagtatctgacatccttctcccactgcttctacacatcctgtgacacgttcatccgacaccggctggatcacggcagccgcaagcttataaagcagagccgttcccgcagtctgaaccagcggtatcacacacagggcaatgcagattactgctcctgccattccaattccattctttaccagcactgccgttccaagcgctacttccgtcattccgcccagaagatttcctactcccggaattgcctctgcccctttcagcacagtacttctcttcaccgtatcgatcgcgggactgatcattccctgaatcagattcgcaccgatgacacacgcaagtgccgtcttcagtgtccagcggatgatcagttccaggaattccgataattttcccagcatatcttccggtcccagaaagttcagaacacggatgatcatatatacccgcaccatcggcaacagtacatttccgattatgatctcaaccgcatagatcaggaacagaacaagattataaaaggccactccagtcacacttcccttcgcaaccgcaactgccagaaagtaaaccggataaaacactcccataaaagcagtgatattacgtatcccggattccacccactgaataaccacatcgaatgccgcaaccgtcagtgccgccaataatatataaatcatatagaaaccgacacttgccacctgtcggttctgaagggtacccgcgaactgattcatgaatgctgcgatcattgcgatcagcaaaatatgtaccagatttttcttccctgtctgaagcagataaagcatctgttctccggcaaattcggtaagaagtttgacggaagatttcagatctccggttaaaatttctgatattacttcttgaaatacaatccgtttttcaggaaacagtgagcgtaaggaatcatcgatttctccatattcaaattccgaaaggatggtttcttttattttctgttgttcctgttctgcatcttccgcagtattttcactgtcttcagataattcatctgcataacaatatataagtcctacatttctcgtcgataaaaacaacagaaaaaaagccaaaatacagcaaagaaaaacacctgccagtttttcacatttcttttcacattgcagattacagctctcattatcttccacattcaatttcttatatttcatatcgtatctcataccagaaatccccgtatcgtctgcaaaagcgcacttaaaaccggaaggctcaagaccagaatcgtaatctttgcgaacacttcaatctgtaatgcgatcgtctgataccccgcatctttacagattgccgacgaaaattcagctgcatatgtaattcccagaattttccacaatgttttaaaataatcactgttaagccctactacattactgacctcattcagtacatctttgagcagactgatctttccaagcagagatgcaaagatcagcatgccaagagcgatactgatatagataccatattccgatttcccgcttttgaactgaagtgccagcagaactcctgccacccccagtattccaatctgcagcatgctcatgcgttccacctcccatgcctgtacagaatacattttttacaacatatagcccctttcctttataatgaaaataaattctggatggattcaaacagatcataaatatacggcacgatccagaacagtaccagcaaaagtcctgcaagactggtcagaaaagcctgttcttccctcccactgtgcttcaacacctgacacagtatcgataccagaatcccgaccgctgcaattttaaatatcagatttatcgtcatacataccctcccttttcttacaggaggatgattgccagaaatacacctccggtcactccgatacattgatacagacggattttctccttctgttccgttctcatgtcctccattttctgctccatttgttccagatacagatccagtgtccttacctgcatctcgatatcaattgttcccaattcacctcccagacggatcaggctctccagcatatcctgtgggattccgattaccggcagatgtgttctcgtctcttcttcccatattcccgccagacttgtaccctgtctgttttccagccgctcatacaaagataacagccacatcttatacggctcctgagcttcactccctacactcaggaatgcttctggaagcacccgtctggaataacggacctcacttctgatccggaaaattaattttctcaggtaacgcatctgcctgtaacattcttcaattttcgccgcctgcagcatcccccagccgctgcccgcaagaatcaccatgactgctccgattgcctttatcatttcgccatttccattgcttctttgtaaagaagactgcccctgttatcaaagatcccttcaatctgtcctacgtgtgcattatttccaagtaaaatgtaccgttcaaatcttccctctccgatcatctggttgaacaacggtttctttcttaattcttccatagactcagcatgtactgttgccagcatcttacacccacagtgcatcgcatattcaatggcatgtacatcttccggtgtcccgatctcgtccactgcgatcacctgcggtcccattgaacggatcagcatgatcattccctccgctttcgggcaaccgtccagaatatccgtccggattcccagatgattctgtgccacgcccatgtagcagccgccgatctccgaacgttcatccaccactcctaccgcaagccccggaatccaggaatttccttccgatatctgacggatcaaatctcttaacatcgtggtctttccacatcccggcggtgatacgattaatgtatgacacaacacccggttgcatacaatataaggaaataccgcatcggcgcatccgatcatctcatgcgccacacggatattcaccgaagaaatgtatttcaggttctttacctttccattttccataatagcctgtcccgataatcccactctgtgtcctccttcgattgtaataaatccctgccgcatctcctgttcacatgcgtaaagagaataattactgatgtattccagcatttcgcggatattatcttttgtcaccaggtatggccgtctggctttcgctccggggataacttccgtgtcatgatacaggaagatcagtggtttcccttcccgaagacgaatctcctgcaagtattcaaattccagcttttccttttgtataatacttctgacatcccatggcaggacctttaagattgtatcttctttcatgttcatcacctctttacacccatgtatatgtggatggatagagattatgactggtatttttctggggacgcaaaaaggtgatatgaaattttgtgttttgtttcatatcacctttactcctatatccattttatacttcttataatcacaagattatccattattttcaaaattgctctttgtttgcagcatttcttctacttgctctttatctagtcctataagttcactaatctgggccgaattcattcctctatcatataatctcctcaccagacaaattctctcttctgctctttcttcacgcaaaccactctctcatccttcacgtctgactcaatttgccttattttccaatctctttcccatactttagtaacaaaaacgccccaggcttccactaccggaaccctggggcattcacattacatcttatattaaatttataatcttattccgctacatccttcatagaaaatgagattcttcccatcttgtccttgccaaggcatacaaccttaacaacatcgccaagtgtcagaacgtcttctacgcggtttactctttctttggaaagcttagaaatgtgtaccattccttcttttccaggtgcaaattcaaggaatgcgccgaagtctttgatgctgacaacttttccttccagaacctgtcctgcttcgaaatctgttacgatgatgtggatcagcttctgcgcttcttccatgctcttagcatctgttccgcagatagatacggcaccgtcgtctgtgatgtcgatcttcacgcctgtctgctcgatgatcgcgttgattgtctttccacgctgtccgactacatcgccgatcttctgtggatcgatctgcatctgaacgatctttggagcgaattctccaacctgtgctcttggagcatcgattgctttattcataacttcatcaataatgtaaagtcttgcttttcttgtcttagcgatagcttcttcaataattggtcttgtcagtccatggatcttgatatccatctggatcgctgtgatacctttgtgtgtaccggctaccttgaagtccatatctccgaagaagtcttcgagtccctgaatatctgtaagtacaagataatcatcatctgtatcacctgtaaccagtccacatgagattccggctactgcagccttgatcggtacacctgctgacatcagtgacatagaagatgcacatacacttgcctgagaagtagaaccatttgattcaaatgtctcagatacagtacggatcgcatatgggaattctgcttcgcttggaagtaccggaagcagtgcacgctctgccagtgctccatgtccgatctcacgacgtcccggtcctctggatggctttgtctcacctacagagtatgatgggaagttgtagtggtgcatatatctctttgttgtctctgcttcatccagaccatccagtttctgagcttcagaaagtggtgccaatgtacagatgttgcagatctgtgtctgtccacgagtgaacattgctgaaccatgtactctagggatcaggtcaacttctgctgcaagtggtctgatctggtcaatctctcttccgtccggacgtttgtggtcttttaagatcatcttacgtactgtcttcttctggtactggtatacagcctcaggaagaactgcaagccactcttcattttcagcaaatgcttcttctaatttttctgttacggcacggatattctcttctcttgtctgtttatcatcggagaatactgctacttccatctcttccggagtaacaatctccttgattgctgcaaagagttcttccggaactgcacagctttcatattcgtgttttggttttccgcattctgccacgattgtgtcaatgaatgcgattactttctggtttaattcatgtgctgcaaagattgcatcgatcatctgctgctctggaacttcgtttgctccggcttcgatcataatgactttctctcttgtagaagcaaccgttaaagccatatcagatactgctctctgagctgctgtagggttgaatacgaattctccgtctaccagacctacctgtgtagtagagatcggtccgtcaaacgggatatcggaaattgttgttgcgattgctgcaccaagcatagctgtaagctccggagcacagtcctgatctacagataatacaaggttctccagtgttacatcgttacggtaatcctttgggaacagtggtctcatcggacggtcgattacacggcatgtaaggatagcattttcggatgcttttccttctctcttattgaatcctccaggaatctttcctactgcatacattctttcgttgtattccacgctcagtgggaagaaatcgattccgtctcttggcttctctgaagcagttgctgtacaaagtacagttgtgtcaccgtaatgcattaatacagcaccatttgcctgttttgcaactctgcctacgtcaacttttaaaggtcttccggcgagttccatttcaaatgttttatacataaatgttttctcctttatttttcttttgtggttcaagattaccccgaaactactgaaaaacacatttttcactatgcaaatgccatataaagcagcatttctgcatcaaatatacttttcagtggtctcggtgaagctttcccaatccacaatcttagttattataacatacccttacataaaaagctatacaaaaaacacttactactgcagaaactgccacttcgaaaagcattcccaaaaaattgcccgcaaaaaaccttacagatgataacttttcaccgatatcaggcaacgaaaaagggacattcttccgaatgtccccataaaaagcatgaattattttcttaatccaagtttctcgatcagtgcacgatatctttcgatgtctgtcttcttcaggtatgcaagaagtcctcttctctgtcctaccatcttaagaagtcctcttcttgagtggtgatcctttggattagctttgaagtgatctgtaagatcattgattcttgctgtcaggatagcgatctgtacttccggtgatcctgtatctcctgctgttctaccatactgtgctacgatctgttctttctgctctttagaaatcatgtttgtttcctcctatatactcttaattaaaacgcctgatattaagtaacggttggagtttccagttaccgaacaccggcttcaacgttgcttagtatatcatatgaaattcctcgtgtaaagagaaatttatacaattccgaaatattccattccttttgcaatatccttatcgatctgtcttttcagtgcatcaatcccgtcaaatttctgctccggtctccggaattttttaagattaatccgtactttttccccgtatgcatttccagaatatccgaaaagaaatgcctcgatcaacagcttcttttcttctgtcacggtcggtttgataccgacattggcaattcccggataagtctttccttcgatatctatcttacagaaatagactccgtgcgccggcacgatctttccttccggccatgctacattcagcgtcgggaatccaagcgtacggccaagctgtctgccatgttcaaccgttccttctacttcaaacggataaccaagcagagtttctgccagccctacatcgccctcttttactacttcttttacataagtactgctgataatccggtcgtgataacgttctttttctataacgatcagttcataatcatactggtctgcatattccgccagcatatgcacatccccgcgtttctcacatccgaatgtaaaatctgtccctaccacgatatatttcgcacgaaacagatcatggatgatctcctgtataaaatcttccgcactcttctgacgaaaagattcggtaaacgggcattcgatcaggtaatcgacctcatcttttaccctttcctgccgttcctctccgaccatcagaagttccggggcaatccctttttccttccataacggtctcatgtcaaacgaacatacgatactgtttatattctcctgttttcctaattcacggacctttgtcacaagcatctgatggcctctgtgtaatccatcgaactttccaaaagtcactgctgcccttccgtttccgttatattccgcaagctctctgatatactgcatagtcttttcttcctcgtttactcgttaaaaaacatcttgacgatgtggtattttttttctttccactggtaaatggcgatgaatttacctgattcatcatacagacggacctgagtttcttcgtcttgtccgcatgcctcttttaacattttaaggtccagaggattcccattcttagcaaatgccttccaatcatctttcaccgtgatcttcggataaaacgggaacatcgcatcgatcggtaccagaagctctgcaagctttccttcctgcttcaaggtttcgatttcatccagcgttttcgcatcttcaatccggaacgttgacacccttgtacggatcagtgattccatgcagcctccgcatccgagtttctcacctatatcatgacaaagcgtacggatgtaggtccctttcgaacacgatacttccatacggactttcggaagatcaatctcaagaatctgaatatccaggatcttaaccggacgtgcttttctctctatgacctttccttctctggcaagctcatataatttctttccatttaccttaagagccgaatacattgggggaatctgttcataatctccgataaacccttcaatagcttctctgactttttcttcggtcagtgcctctgttgacttttcttccagaacttcacctgtaatatcctgtgtatccgttgtcttgccaagaagcaacactgcttcatatgtcttgttcttgtcagtcaaaagatcacaaagcttggttgcttttccaagacacaccggaaggacacctgtcgcatccggatcaagtgtccctgtatgtccgatcttcttttgtccgacgatcccgcgaagtttcgccaccacatcatgggatgtaaatcccttttctttatacacattgataattccgtgtatcatagtttactgctcctgtgtcttttccagtttttccatctgtgcctcaatctgtttggacaaattattcagcacatcaaacggtgttcccgccattgtaaatccggatgccttcttatgaccgccgccgccaaaatactgtgcgatcttgctgacatcgattttctctttggaacggaggcttactttgaattcattctgtttcaactcatacatgaatacagcaacctctactccttctgtcacgcgaagctggcttacaattccttccagatcttttggtcccacaccgtaaaaatccatcacatctctccgaatataggacgcgatacctgttccatttaaaaacaggatactttccatcagtgcacggcccatcacaagattctgcgcataagatttcgcatagaatgtatcttctatgatctttggtccatcaatgcctttttccagaagatttgcggccacccggaatgtctccggtccggcgcaggaatactggaatacgcctgtatcatgcacaattccaaggtacagtgcttccgccacattttgggaaatcttctcttcatccagaagtccgtataccagttctgatgtcgaacttgcttccggaacgatatgatttacatctgcaaagccgatgttactgatatggtgatccacacagaacgtatgctttgctttattaaataacgttttagaatactccagtctgtctgtatccccgcagtccagggaaatgaagagatcatatactttctcttcatcatccacagactccaggattgtctctgtcccttttaaaaaatgaaacgattccgggatatctttcagataaatatccacggttttatcactgtagttttcacggatatactgtccgagtcccacacaggaacccacacagtctccatccggacgcacatgtccgccgatcgcgatcgtggacacgttctccaatactttattcagcatcttcctcaacaccttccgttttcaggtctttggttacttcatcaatcttctttgacatattcacaccatactcaatggactgatccagtacaaacttgatctcaggtgtattacgcagattcagtgttctggccagttcacgacggatatagccttctgcactctgcagccccttaattgtctgctcctgctcataagcatctccaagtacactgatatatgccttacatgtcttaagatccggtgcaacttctgcagccacgaccgaagtccacggtgcaacacgcgggtcttttaatcccccgcggatgatgttcgataactcatgctgcacttctgtatttactcttgtattcttaatgcttctttttctcatttatatcaactcctagcgtggaatctctaccatcttgaatgcctctacgaggtctccttctttgatgtcattgaagtttgcaaatacgaatccacattcgtaacctgcttttacttcttttacatcatctttgaatctcttcagagatgccagaggtccttcaaatattacaataccgtcacgtgtcaggcgaacagagcagtctctttcaaatacaccatccagaacataagatcctgcaattgttccgactccggaagccttgaatgtctgacgtacttctgcgtgtccgagtaccttctcctcaaatacaggatccagcatacccttcatagctgcttctacatcttcgattgcattgtagatgacacggtacagacggatatctacaccttcacggtctgctgtttcttttgctgttgcatccggacgaacgttgaatccgatgatgatcgcatttgatgcagaagccagacttacgtcggattcattgattgcaccaacgccgccgtgaatgatcttaacgactacttcatcattagacagcttcagtaagctctgtttgattgcttctacagatccctgtacatctgcctttactacgataccaagttcttttaagttgccttcctgaatctgtgtaaacaggtcatccagagaaagtttagattttgtctcttccagaagttttaccttgctctgtgaaatgaatgtctctgcaaagtttcttgcttctttttcatttccacatccgacgataacttctccggcattcggtacatcgttaagtccaaggatctctaccggtgtagacggacctgcttctttgactcttcttcccttgtcatccatcatggctcttactttaccaaatgcagaacctgctgcgattggatctccgacacggagtgttcccttctgaaccaggatatttgcaacggaacctcttcccttatccagttttgcttccagtacaagacctcttgcacggcggtttggattggcttttaattccattacttctgctgttaaagcgatcatttccatcagatcttccagaccttctcctgtcttggcagataccggaacgaagattgtgcttccaccccagtcttccggaatcagttcgtattctgtcagttcctgttttacacggtcaatgttggcacttggtttatccatcttgttgacagctacgatgatctctacacctgcagcttttgcatggttaatcgcttctactgtctgcggcataacaccatcgtctgctgctactacgagaactgcgatatctgtagagcttgctccacgcatacgcattgctgtgaacgcctcatgtcccggagtatccaggaatgtgatcttctctccgttgatctctacaacataagcaccgatgtgctgtgtgataccgccggcctcacggtcgatgacatttgtatgacggattgcatccagaagggaagttttaccgtggtcaacgtgacccataacgcagactacaggcggacgtttcttcatcttcttttcgtcctcttcttcttcttttagaagttcttcgatcacgtctacaacttcttctttctcgcagagaacgtcgaattccagcgcgatctcttctgctgtctcataatcgatctcctggttcaccgtagcaacttttccctgcataaagagctttttgataattacagacggaacaatcttcatcttatcagccagttctttgattgtcagaacctctgggattgtgatctgtttgatctcttcctctaccttctgctctttctgctgtggtttctgaagctgctgttttggctcgtttttcttcttgccctttggcattctttcttcatcatcacgacgataatctttcttcttgtgatcgtcttttcccttggcattctttctctgtggtttctgtccttcgattgcaggagccggaatgcttgggttgttctttctgtcatttcttctgttgtcgtttctgtctccgaatttacgtccctgtctgtcatcgccacggttattgtctcgtctgttatcacggtctccctggtttctgtcggaacgtccgttctgcgggcggtctcctctctggaatctctgtccgcctcttccttcctggcggtcaccgttacgtccgtctcgtccgccacgtctttcaccaccacggttatttctgttatcggatctgtcgtttctatcagatctttcatttctttcagatctctccggtctttcacttctttccggacgtctgttctgtgttctttctgctgccggtttctctgtcctctttggagcctgtgcttcttctgcagacgcattctgtgctgcagaacggtcagaacgtcttgctggacgaccgttatttacctgcatcggttttccctgtccggaattctgacgatttcctccggatcttcttcctttgttaccaccgttctgtgcattctgcggacgtattacatgcacgatattctttttctttggtgtttctgatttttgtgtattttcgtttgtatttgtttctatatctttattatttgacatataatctgcctcctctatgcaattgtctgattctctgtgtctatatgcttccggattccttttgcaaatccctcatccaggataaccaaagatgcacggaactcttttcccattgcatgccccaatgtatctttatctttgtaaaaatagatcgggacctgataaaagtcacacatgttctgaaatttcttcttggtattatcggatgcatcgtctgcaacgatcacaagatatgcccttccggattttacttctttctccgtacagaactccccgcttgcaaccttgccggctttcgtggcaagaccgatcatagataatgctttattctgactcaagtacttccatctccttttccagtgcttcatacacttctttcgggatagcctgcttaaaggatctctccaggcccttattcttcactgcttttgcaaggcagtcaccattcgggcagagataagcaccgcgtccgttctttcttcctgttgcatccagtagaaattctccctccgatgtgcggatgacacgaatcatctcttttttactcttcatttcctgacatcctacgcatttacgcataggaacttttttatttgctcccacgaattatcacctattcctctgtatcctctacttcatcgaatgtgatctctgcgtcgtcatcatcatattcagcatctgctgtgttctctacatcgaattcttctgcatcgtcatcgtactcttcttcgtatacgccttcgcttaattccatgtagttctccggaagttcaccggattcgattgcctgtgtctcattcttgatgtcgatcttatatcctgtcagtcttgctgccagtcttgcattctgaccttctttaccgatagccagtgataactgataatccggaacgataacgcttgctgtcttttcatccggatcagccattacagaaataacctttgcagggcttaatgcattctcgatcaggattgccggattgtcactccagttgatgatgtcgatcttctcgccgcgcagttcattgacgatcgcattgactctggctccgttcataccaacacatgcaccgaccggatccacatcaggatcgttagaccatacagcgatctttgttctgcttcctgcttctcttgcgatactcttgatctctacgataccgtcctttacttctgtaacttctgattcaaacagacgttttacaagttccggatgtgtacgggataccaggatcttaggtccctttgtcgtattctttacttctacgatatataatttgatacgttctgtcggtttgaagacctcaccttttacctgctcattctctgtcagcatagcatctgctttaccaaggttgatgctgacattctttccaacataacgctgtacgatacctgtcacgatatctttttctttttcaaaatactgatcgtatacaaccttacgctcttcttcacggatcttctgtaagatcaggttctttgcattctgtgttgcaatacgtccgaatgatttggactcgatcggaatatgcacgatatcaccaagctcgaacttgctgtcgatctcttttgcatcttccagactgatctgctccagtttgtcttccacttcttctacaaccgttttctcagcgtataactgatactcacatgtctccttgttcatgatcagtttgatgttgtctgtcttaccgaaatggttatttttaacgagagtttgatcctggctcaggatgaacgctggcggcgtgcttaacacatgcaagtcgagcgaagcgcttaagtttgattcttcggatgaagacttttgtgactgagcggcggacgggtgagtaacgcgtgggtaacctgcctcatacagggggataacagttagaaatgactgcgaggctatttaacgtcagttgggaaaaaaccattattatttaaaacatcttgcgccggatgtacgtttatatacatttgtggaatctacgaagaaattgtataaatatacgcctaaaggagtagaaattgcttcttttaccagaacgaagaatacaaggaaaagaacatcctaatcctgatttattgttttataagttattatatcaagcgatttctcgagcaagagtaaaattatgtgtgttagtagtagaaaattataaattattttctgatatcttaaatataaaatttgatatgttatccagatatcaatataaagaaaattatacaaatacaacactgtcagtaaaaaagttaaatcgatttactaaaaaaattaaggacaaactttcggagttaaataatgcaattacaatttcggaaacagtagacattataaatgatgaattaatgggagcggaattaaagaagaaagttgtgagaaatggtctaaaattattgcaactaatatgtggtaaagcctgtgctggtagcagcatcggttaaaaatatagaaatgctagactttagcagagtaataagataaaatagaattaattattttttgtcagtacaaaggttaaaggagttagaaaaaatgtatgaaatcatgagtgcagatgaagccatccgtctgatcagggatggagactgtatctgtgtcaattcatttgtaggaatagagaacccgacagaacttcatgaagcaatctaccggagatatcagaagatgcagtctcctacacatctgacgattgtatccagtgcgggattcggcgtctgggatgaagaacataatgcagaaggatatatcagagaaggtgcagtagacaaactgatctgtggacatttcggagccatgatgagcacaaagaaactggtgctggaggaccgttttgaagcgtataatcttccccttggatgtatttctcatgcaatccgtgcacaggccggaggtctgccgggagccctttcgaaagtcggactggatatattcgtagatccaagaagagaaggacctggtattaaccgcatatccatcgatgattcactggtaaaacatgtagaagtagacggggacgaattcctgtattacaagcttccgaagattacgatcgcactgattaaaggaacagcagcagacagaaagggaaatatcacattcgatgatatgtttatgtccggcgatgctctttccatctgtcaggcggtaaaggcaaacaggggaaaagttatcgtacaggtagaccgtctggttgatacaccgtcgcgtccacgtaacgccattattccgggatgtcttgtagatgcaattgttgtggcagagccggaaaagagaaacgaagcgtatacggcgcttacgggaagctttgagattccttacaaggactggtatacatggagtgaaaagatcgagaatgtatcgaccaaaccaaaaaagaacagtgtgacgggcaatatcattggtaagagagctgcacaggaacttcgggtggatgatatcgtgaatatcggaatcggtatcccagagatggtatcccggtatgcgagaaagagcggcatgctggatatggtaacccttacggtagagtcaggtggtatcggcggatttcctgtatcgggagaagcatttggagctatgattggtgcagcgtcagtctatgatatggcaaaccagttcgacttatatgataacggaggactggacatctgctttatgggagctctggaagttgacaaatatggcaacatcaatgcacacagaggaccgggtgcatttgccggaatcggcggatttgcaaatattacggcaaagacaccgacggttgtgttctgtatgacatttgatgccaaaggtctggaggttacgcagaaaaaaggagtggtgacgattcagaaagaaggagaaattgctaagttcgtagagaaggtcaacagtgtaagcttctctgcaaagcgagcgattgaaaacggacaaaaggtattgtatgtaacagaacgctgtgtgttcagactgacaccaaaaggcttaaaactgatcgaagtctacccaggagtagatatgcagaaagatattctggacaggctgccgtttgaggtggagatttaaattgggatttatttaattcaggaaggcacgacgacccggacctgcataaaaagtaggaagccgttcctgttcaggttccgtcggcgggaaatactaaagcgtcaaaattatgctaaaaacgggcttccgaaatttgcaacttgccattcggctcaaacaggcaaatttcgaaaacccaacgcataattttgacgcttaactatttccaacaccttcttcacannnnnnnnnntattaacattcacagccagtcacgacttgaaggaaacaatagataaggattattgtgaatgtggaatgccgttagaaacaattagagagtcagaagcaccgttaaaggaacgaagagaacgtgtttgaggcgaacgccgagtttgagcgtagttcctttgcttttaggtgattcagactctcttagtgtttcttatggtatggaacctgaacaagaagccttatctattgtttccttcaaggactgagaggccgcttctccagttaataaattaaatcccaagaattacagaatatcaatatattctccggccaaagctttattcatacttctgactgcacagaattttccgcacatactgcaggtatcactatgatcatcttccgggcttcggctgtcacggatggctttggctgtttcagggtctaatgcacaggcatactgtgcgtcccagtcaagtttctgacgtgcttcagccattttatcatcaatatcacgtgctccgggaacacctttggcgatgtcggcagcatgggcagcaatcttggaagcaatgatcccctgttttacgtcatctacattaggaagcgccagatgttctgcaggtgttacataacataagaatgcagcaccattcatagcagcaactgcaccaccgatagcggatgtgatgtgatcgtaacctggagcaatatccgtaacaagagggccaagtacatagaacggagcacccatgcagatactctgctgtactttcatgttggcagcaacctgatcaagcggtacatgtcccggtccttctaccattacctgtacattgtggtcccatgcacgttttgtaagttctccaagacgcacaagttcttcaatctggcatacatcggtagcatcggccagacatccagggcggcatgcatcaccaagggagatagtaacatcatattcttcgcagatatcaagaatctcatcatagtgttcgtagaaaggattttcttctccggtcatacacatccatgcaaatacaagacttccgccacggcttacaatattcattttacgtttgtgtttttttatctgttcaatcgttttacgtgtaattccgcagtgaagtgtgacaaagtccacaccatcttctgcgtgaagacggacaacgtcgatgaagtcctgcgcagtcagagttgcaagatctctctgatagtggatgacactgtcgtatacaggaacagtaccgatcatagcaggacattcatgtgtcagtttctggcggaatggctgtgtgttaccgtggctcgataaatccatgatggcttcagcaccaagatttacagcgctcataactttttccatttcaatattgtaatccttacagtcgcgggatacaccaaggtttacattgatcttggtacggagcatgcttccgacaccctccggatcaaggctggtgtgattcttgttggcacagattgcaaccttgccttctgcaacaagtttcataagtgcttctgttgtcatgttttctttttttgctacaatctcaatttcaggagtgacaattccttttcttgcagcatccatctgtgttgtgtaatttctcatgtgtttgcctccgttaaaaaattaaatataaggttataatgcgtcagcaaaaacacacagatttcgatgcagggaaacatttctctacacagatctgaggttcataaaagaactatgaaattactgacgcctatatcagatgggaaaatctgatacttgtgtatgcggtacaaggtggtgtccccaatgtaccgtttctaaacaactcttaacgagtcgtttttatcatagccattacgccgcttttgttcagcgctgtaatcagcagaaatgcaagaatgcttcctgcaatagtagaaatcagaaatggaactacatagacgaagatcccggcaggagtgattcccataatatatactgcaacaggataagcagccaggccgccaagaattcctgtgccgagtgcctctgcaagacaagtcaggctgagcttgtggcaaatggagtatacaagtccacagcaaagtgctccaaccatacttccgggaaaagccatcatgctgccaagaccaagtagatttcgtaacaggctggcacaaaatgcaattcctacactgtaccagggtcctaacgtgactgctgccaggatattaataatatgctgtacaggtgcacatttactgcctgcaaccggaaagcttaagaaacttccgacgatggcaagagccgtaaatacaccggcaagagccagtcgtcttgtccgtgaagagtctgatgataaagttgtgtgtgtcataaataaacattcctttcataaaaaaatacccttcattcataaagcggatggagggtacaaaaagtaaaaaagaagagatgcgggggcatctctgtcaaatcaatacatggtatgaatccctccgttggcattatccaaatcaggtaaagggtcgaaacggaattacgcttcctctcagccggttttctccagctcccccctgtttataaaaaactttgttcaatcgttattatagtctggcatatcggaaaatgcaagaaaatttttctgctggtaagaagaagaggggatttcatatgctgtttaaaaagtctggaaaaatataaggaatcttcatatcctacagattaagtaataaaagtaagaaaagcggaagctggtgtaaaaaatagtttctgctttttgcgtttcggttattctatagatgtcggatgatttgatgtatacatgacatagaaaggtatgctaaaatagaaaaagatgttgttataaaaactgtactggaaaagaagcagcgtacagacagatgtatggactggaggttcaaaaaaagaatgagagagaataatctagagaggtttatcaaagcgcaggagtcagaatttaagacagctcttgcagagattaagagtggacataagagaagttgctggatgtggtacatttttccgcagattcaggggctggggagtagcggtactgcaatgtactacgctattgaagactatgaagaagctaaagcatatatagaaaacgcagtgacaaatgcacatttaagagagagctcagaggcacttttgcaactggaatcagatgatgcaaccagagtcatgggatggcctgatgatctgaaactgcgttcgtcaatgacgttgtttgcgctggcggcaaaagagaatgaagtctttcggagagtactggataagttctttgatggaaaattagatgcgcagacagtagatatcctggatatgagatatctggtgatgagaattgatgaaccggattttggatgtgaaggaagaccggacggggtagaaccaatggctaaagtaacccttctgaagctgaaaagtgaagaagagattcagttagagattccggatgcggaactttatcagaaggagattaatgagggcaatgaagtggcattcagtccggatggggttatattaaaactttcataaactatatgaagctatatgtgtgaagcgtggggagaacgtaaaaatgtgtgaaaaagatcgcgtatgtgctacatgaaaggggagagtgtaaaaatatgaaaaataaaaaggaaaagaagcaggaagaggaagagctgaccggtatggcggctgtatgggattatctgaaaacatttctgatcatattctgtgttgtatttgcgatgaacaaactggtgtatatcaatgccgtgattccgtcggaatctatgcagaatacgattatgaaaggagaccgggtgctgggaaaccgtctggcatatatcaaagatgatccagagagatatgacattgtaatcttcaaatatccagatgatccgtccaagatttttatcaagcgcgtgatcggactgccaggagagacggttaccgtgaaagacgggaagatttacattgatggaaaagagcagacacaggcggtaagcttctgcccggaagagatggcaggaagcttcggaccttatgaagttccggaagatagttattttgtaatgggggataaccggaacaatagtctggattccagatactgggataacacgtatgtaaagaaagaggcaattctggccaaagcaggattccggtactggccgcttaataaagttggatttgtaaataaatctgcagaaaaatagttgcaattgttttctgtgttttatataatgaataaagttttgcgagaaaaggctctgaagcgatatcagggtcttttcttaacgtaaacacatagaatgaagatgaaagatagcgatatacacagatgacggaaaaggaggaaaacaggatggaaaaagatatgacggccggcactcccggaaagatcattttcaattttacaatgccgatctttatcggtaatatttttcagcagttttataatatggcagatacggtgatcgtcgggaaatttgtcggtaatgcggcactggcggcggtaggagcatgtggaacactggtatttctgatcattggcttcctgcagggagttacggcgggatttacggttgttacagcacagcacttcggagccggaaacatgaaggcgatgaagaagtctgtggcatccggtgcggtacttacagggatcgtaaccgttattcttacattgctgagcatgatcagtatggcgaaggtgctgcatctgatgaatacaccgtcagacatgtatggagaagcttacggatatattatggtcatttgcggcgggattgtggcacaggcactttacaattatcttgcaagtgtattaagggcactgggcgatagtaagcgtccgctttattttcttgtgattgcagcacttttgaatattgtgctggatctggtgtttatcattgtctttagaatgggagcggcaggggcagcctatgcgacagtgatcgcacagggaatttcgggaatcctgtgtctgctatatattgcaaagaaggttcccgcactgtatcttcatagagaagactgggaaatagataagaatctggccggatggcagctgaagatcggacttccgatggcattccaatattccatcacggcgataggaacgattgttgtacagtcttgcctgaatatcctcggttctacagctgcagccggatttgcggcagcaagcaagatcgagcaggtgtttacgcaggcctacgttgcgcttggtacaacgatggcgacttactgtgcacagaatatgggggcagggaaatatacgagaatccgtaaaggatttaagagtgcaacattgattggatttatttatgcggttgtgacaggtgtgattattttctttgtcggaaaatatatgacgatattctttgtatcagagaatgtaaatcagatcatggaatatgtggatatttatttgaggtgtgtaagcgtgtcattcctgcctcttgttattgttaatttgtatagaaacggaattcagggaatgggatatggactgcttccgatgacagcggggattgcagaacttgtcggacggagcggtgcatcgctgattgcatcacattttggcagctatatgggaatctgtctggcatctccggcggcatgggtgctggcgggaacacttcttcttattatgtactttgagatcatgaaaggaaagaaagacagaaatttgaaaaatagatagaaaactgaaaagcaacttgttataataaaatgtacgaatgaacatagaaacattgatgggtgaaacagcatgaatcaaagagtaataaaaaaagtccgctgtaatatctgttcagcgggatgtccgatcgatgcttatgtagaagaaggaacgcttgtgtcggtagaaggcagccgggatcttccggggcagagtggaggattatgttctaaaggagctgcttccaggcagtatgtttataacaaagacaggattctgtatccgatgaaacggatcggaaaaaaaggaagcggggaatttgaacgcatatcctgggatgaagcgtatcggatgattgcagagaatcttctcaggatcaaaaaagaatatggtccgcaggcggcagcattttatgcgggatatccgaaatggtacagaccggcacttctgcggcttgccaatgcttacgggtctccgaattactgtacggaatccagtacctgttttcagtcggcggcaatggcatggaaatctatttatggaaatgacatctgctttccggatctgatgcatgcacagacggttctcgtatggagtaacaatctgtatcattccaatgtgggaatggcaagaccttatcagtcgttaaaagcacgtggggcgaagatcatagccgtagatccaagagagaccgtaacgacacaggcagcggatatccacttgaaacttctgccgggaacggacggagcacttgcgctgtctatggcacaggtgatcatagaagaagggctgtatgataaagaatttgtagaaaaatatgtatatggttttgaagaatacaaagcgtatgtgaatcaatttccaccggaaaaagcagagaagatcaccggtgtagataagaaactgatccgtgaagctgccagaatgtatgcatctaacgggcctgccggggtgatgttttcagcgtctccagttgtacataatattaatggaatgcagaattaccgggcagtgatgtgtctgatcgcacttaccggcaactatgatattccaggtggcaatccgtcaagaccgggtccggtgtctccttgcaatgaatatggaaaagtaaaacggctggatacgatagaagccatcggtgagaaagattttccggcatggtttgatctaccgtgtgaggaagcgcagtgtacaagaattgcagattatattctgaaggaagaaccatatccgttgaaagctgtggtgggattcggcctgaaccacagaatgtggccggagccggagcattttcagaaagcattaaaagcgctggacttttatgtgaatgtagatctgtttttctcagattcaagcaagatggcagacctggttcttccggcagcgtcttcctttgaacgagatgttgtgctgaatggacggggaggaatgttcttcctgtcagaaaaagcaatcgaaccggtcggagaggcgaagaatgatattgagatcatgatcggcatgcttcgtgccatgcagttacatgatgaagcattggaacatggctatgagaaatatatggaatatattctggagccatccggtgtcacactggaggaattgcgggcgcatccggaaggggtaaaaggacgtgtgatcactccgcctgcatttaagagatatgaaaaagaaggctttcatacaccatccggtaaggtggaatttgtatcacagatactcgaacgttacaaagacagccacggatattccggacttccggaatacagagatttccgtgaggtgtcaggcatggacagggaagcatatccactgattctgaataccggttccagaaaaccacagcttttccatgcaagaacataccgggtaccgtggcttgcaggacttgaagaggcaacactggtagaaatccatccgaaagatgcgaaaaagtatggtattgcagatggtgacatggtgagggtatcttccccggtgggaagtatctgcggaattgcggcggtttacctgaacagccagccgggaattgtacacgtctatcatggcaatgcaaagggtgaggcaaatgatctgatagacagaaattatctggatccaatttcaggattcccgggatataaaagttatttctgtaaaatcgagaaagaaaaaggcgaggtgaaggcatgagttaccgattaaaatttgatccggataaatgtgtcggctgttatgcctgtcatatagcctgtctggatgcacaccatgatgtggaagatgtagatgcaaagagccatcggacggtcaaaaaggtagtgaaaaatcagtttgaaaagaatatctgtccgggctgtgctcactgcggtatctgtatcaaagcctgtccggtgcaggcaatttacaaagatccgaagactggatttgtactgacagacaaagaaaaatgtattggatgtcatgcctgcgaaaaggtctgcccgaaagacgtgatccattttgacaaggacggaaaaatggaaaagtgtgacgggtgtattgaaagaatcagggaagggcgggaacctgcctgcgtcagagtctgtttttccggtgcgatcacactggaataaagacgaatagataaaaaggtgagactgataaaagtaagaatagatgaaactggataaagctaagtaaagagagataaggataaaggcgtatgttaaaaatcaaggaatatgtgaaggcagaaagtctggaacaggcatatgaactgaaccagaagaggacgaactgcattctgggcggcatgttgtggcttaagatgtcgaaccggaatgtacagaaagcgattgatctgtccggacttggtctgaatcagatcgaagagacagaagaagaattccggatcggatgtatgacgacactccgtgaactggaatgtcatgaaagattgaaccagtggtgtgaaggcgcagtaaaagatgcggtcagtgatattgttggcgtacagttccggaaccttgcaacgattggtggaagtgtattcggacgctatggattttcggatgtactgacggtgtttcttgcaatggacagttacgtagaactgtataaaggagggattgttccattacaggaatttgcgcagatgaaaagagacaatgacattttagtcagagtcattgtaaaaaaggatcagagaaatatgatctatctggcacatagaaattccaagacagattttccggtattgacatgtgcggtttcagtaaatgctgaaaatggatgcgtatgtatcggtgcaagaccgcagaaggcggttcgactggaactgacagaagcagtcagagaaaaagtatggagtggtgtctgtactgaagaagagatgaagaaagaggcagaatgcattgcttcacaggtgaagacgaacagtaatatgcgcgcaggcaaagaatacagaagccgtctggcatatgttctgatccgcaggacattggaagcactgaatacaaaaggaggagatcagtaggatatgaaagtaaagattcttttaaatgggacaatgagagaagcggaaatatccagcgatcagcttctgatcgattttgtcagagatcatggatgctatagtgtaaaacgtggatgtgagacgtcgaactgcggtctgtgtacagtgtttgtagatgataaaccggtattatcctgttcgatgctgacagccagagtcgacggatgcaaggtagatacgttagaaggacttcaggaagaagcaaaagaattcggtgcatttgttgcagatcaaggtgcagaacagtgcggtttctgcaatccgggaatgatcatgaatgcaattgccatgttccgcgagaatccggagccgacaagagaagagatcaagacatatcttgcgggaaatctttgcagatgttccggatatgaaggacagcttcgtgcaatggaagcatttatcgaatacagaaagaaaggagaaagatcatgaaagcagtcggacaaccgataagaaaaaaagacgcaatggcactggtgacaggaaaaccggtattcatggatgatcttgctccaaaggactgcctgatcgtaaaggtactccgaagcccgcatgccaatgcgatcgtaaaatcagtaaagacagatgtggcaaaaagagtgccggggatcgaagatatctacacgtgggaagatgtgccgcatgaaagattcaccacagcgggacagacatatcccgaactcagtccgtatgaccgtctgatccttgaccagcatgtcagatatgtgggagatcctgtggcaatcgtggcaggagagaatgaagcgtgcgtggataaggcacttaagatgttgaaagtagaatatgaagtacttccggcagtactggatttccatacggcaaaagataacgaagtactggtacatccggaagacaactggaaggcactttgccaggtcggcgcagataataagcggaacttatgtgcatgtgacagcactgaagacgggaatgtagaggcagtgctggctgactgtgatgaagttgtggaaggcacctatcatgtaagagcagcgcagcaggccatgatggagacattccgtacgacatgctttatggatgcttatggaagactgaatatcttaagctctacacagattgtatatcatgtaaggcgtatcatttccaatgcacttggaattccgaaatccaggatccgtgtcagcaaaccgagaatcggaggcggatttggtgcaaagcagtcggtcgtggcggaattattcccggcatttgtcacatggaagacgggaaaagcttcgaagatgatctttacaagagaggaatcgcagatcgcatcgtctccgagacatgagatggaagtacatgtccgtctgggtgcatcgaaggaaggaaagatccgtgcgatcgatgtatatacactgtcgaatacaggcgcttacggagatcacggaccgacgactgttggattgtccggtcataaatcgatcccgttgtatagttcggcagaagcacaccgttttacatacgatgttgtgtataccaatcatatggctgccggagcatacagaggatatggcgcgacacagggaatctttgcagtggaatctgcagtaaatgaaatggcagaacgattacatatcgatccggtagaattccgtctaaaaaatatggtaagagaaggcgatgtgatgcctgcatattacggtgagacggcacagagctgtgcacttgaccgctgcctggagcggactgcggaactgatcggctggaaggacaagtatccgtgtaaagacatgggaaatggtaaagttcgaagcgtcggtattgcaatggcaatgcagggatccggaatctcgggcgtagacgtcggctccgcgacaatcaagatgaatgatgacggattctatacactgatgatcgcggcagcagatatgggaaccggatgcgatacgatcctggcacagatggcagcagagtgtctggactgtccgatggaaagaattgaagtactcggtgccgatacagatgcgtcgccatatgattccggatcttatgcgtcaagtactacgtatataacaggtaaggcagtagaaaaagcatgccagaagctgattgccagaatccttgagattgcatcaggaatgctggaggcacctgtggaagaactggtatttgcaagcgatcatgtagaatggccgaaagaacagaagagtgtatcattggaagatatcggtacgaaatccatgtgcggtaatggctgtgcgcttgaggtgacagaaagtaatacgtctccgacatcaccgccgccattcatggcaggggcagtagagatcgaactcgacaaagagaccggtcatgtggaaatcctggattataaggctgtcgtagactgtggaaccgttgtcaacccgaatcttgcaagagtgcaggcagaaggcgggattgtacaggggatcggaatgacgctttatgagaatatccagtataatgaaaagggaagaatgctgaataactcattcatgcagtataaagtaccatccagaagagatatgggaaatctgcaggtcgaatttgaaagcagttatgaaccgaccggtccattcggtgccaaatccatcggagagatcgtaattaacactccggcaccggcgcttgcacaggcgattgcgaatgcaaccggcatctggttcaaagatcttccaatcaccagcgaacagattgcaatgggcgttctggagaaagaactggaaaaataaaatatattagaaaaatatatagtgaaactacttgcaatcagacgcaaaagttattacaatattgggtaacgtttagaaaaatatgtggaggccgctaagatgcagttattaaaagacagaatccgcaaggatggcaagataaaagaagggaatgtcttaaaagtggacagctttctgaatcatcagatggatgtaaagttatttcaggagattggaaaagaatttaagagaagatttgcagatgaagagatcacaaagattcttaccatagaagcttccggtatcggcatcgcatgtgttgcagcagaagtatttgatgttcctgttgtatttgctaagaagacacagaccaagaatattgccggagatgtgtacactacaaaagtagaatcatttacacacggaagagtgtatgacattattgtttccaaagaattcctcggaaaaggtgacaaggtacttctgatcgatgatttccttgcgaatggaaaagctctggaaggacttgcagaactggttacaaagtcaggagccgagcttgtcggagctggagttgtgatcgagaagggattccaggtcggaggagatatcatccgttccaaaggtattcatttggagtcattggcgatcgtagaaagcatggatgaaaagacaggagaagtggttttccgcgattaatagataaaaattcaaaggatttttaagggaatgtgaggctttcatattcccttttttttattcctatgctatactttatgataagtatgtgaatgcataaagagaacttatggtaaggagtaagaacttatgaaaagagtattgttaaaactcagcggggaggctctcgcaggcgataaaaagacaggatttgacgaagctacctgtatgggtgtagccaagcaggtaaagcagcttgtagatgatggggtacaggttgcaatcgtaacaggtggaggtaacttctggagaggaagaaccagtgagacgatcgaccgtgtgaaggctgaccagatcggaatgcttgcaacagttatgaactgtatctatgtatctgatattttccgttatgcaggcatgaagacagaagtatttacaccgttcgtatgcggtgcatttaccacactgttttccaaggatgcagcagtagaagcattgaatgaaggaaaagttgtattctttgcaggcggaacaggacatccatatttttcaacagatacaggtgcagttttaagagccattgagatcgaagcagatgcaatgttactggcaaaagcaattgacggtatctatgacagtgatccgaaggtaaatccggaagcgaagaagtacgatgagatatctattcaggagattatcgataagaagctgatggcagtagatcttaccgcttctatcatgtgtctggagaataagatgccgatgctggtattcggattaaatgaggagaacagcattgttgagacaatgaagggtacatttacaggaacaaaagtaactgtataaaaatgcagataagcagataaaaggagataacactatgaatgaaagattaaaaccatttgaagaaaaaatgaagaaaacaatcggaaatctggacggagaactttctgcaatccgtgcaggccgtgcaaatccgaacgttctgaataagatcatggtagactattatggaacaccgacaccaatccagcaggtagcaaacgtatccgtaccggaagcacgtatgattcagatccagccatgggaaaagaaaatggtaagagagattgaaaaagcaatcatgacttcagatctggggattaatccgacgaatgacggaacaactgtacgtcttcttttccctgaattaacagaagatcgaagaaaagaactggtaaaggatgttaagaaaaagggcgaagcagccaaagttgcgattcgtaatatccgtcgtgatggaatcgattctgttaagaaactgaaaggttccgatgtgtcagaagatgaaatgaaagatatggaagatgatcttcagaaactgacagacaaatatgtaaaagaagttgataaagctgtagaagcaaaatcaaaagaggttatgacagtataagacctgtaagagataaaagcagtatacaacaggagggggataaggtccagatgctctggaaactgtcccctctgttcttgtatacctattgttattaggaggaaataatcatatgaatgtgccacaacatgttgcgatcatattggatggaaacggacgctgggcaaaagcaaaaggaatgccgcgcaattacggtcatgcacagggcagtaagaatgtagagcgtatctgcgaagaagcgtggagaatgggcattaaatatctgacggtctacgcattttccacagagaactggaatcgtccggacgatgaagtcaatgctctgatgaagctgcttcgtaattacatgaagacctgtctgaaaacggctgcaaagaatgatatgaaagtccgcgtgatcggggatatcacaagactggatgaagacattcagaagagaattctggaactggaagaagcaacaaagaataatggcggtctgaatttccagatcgcgattaattatggaagccgtgatgagatgatccgtgcgattcgtaagattgcaaaagactgcgtggatggaaaagtggatccggctgagatcaaagaagaaacatttgagcaatatctggatacaaaaggaatcccggatccggatttgatgatccgtaccagcggggagcttaggctttccaattatctgttatggcagcttgcctatacagaattttattttacagatgttccgtggccggatttcagtaaagaagagctggaaaaggcgattgaaacatacaatcaccgtgacagacgttatggtggtgtgaaggaggaagaagaacagaatgtttaagacgagattattaagtgggattgttctggttatcatcttaattgcaacggttggaaccggcggtggtttactgtttggatttctggcactgatcagtctgatcggactgtcagagctttataaagttgtggatgtgcagaacaagatattaggacttaccggttatctgggagctgttgtatattatggaattttatataccggacagatgcagtatgtgacacttcttacaattgcatttctggtagtactgatggcggtgtatgtgttttcattcccgacatttaaggcagagcaggtaatgacggtgttctttggcgtattctatgttgcagtgatgttgtcttatgtgtaccagaccagaatgctggaagacggagccgttgcagtatggctgatctttttaagctcctgggggtgtgatacctgtgcgtactgtgcaggcatgcttcttggaaaacacaagatggcaccgaagttaagcccaaagaaatctgtagaaggcggaatcggcggaattgtcggagctgcattactgggtgcaatctttgcagttgcagcaaataagattacaggagctggtgtgaatccggcacagtatgcggttatttgcggagtcggcggtatgatctcgcagatcggagatctggcagcttcagcgatcaaacgtaatcatgatatcaaagattacgggaaactgatcccgggacatggcggaatccttgacagatttgacagtgttatctttacagcaccgatcatttattatcttgcaacattccttgcaggaagattgtaggaggtaagtatgaaaaagatagcaattttaggttctacaggttccattggaacacagaccctggaagtggtaagagagaatggagatatcgaagtactcggactggctgcaggcagcaatatcaagatgctggaagaacagatcagggaattccacccacagatcgtggctgtatggtcggaagaaaaagcagacgaattacgtgttaatgtagcagatacagatacaaagattgttgcaggcatggatggacttctggaagttgcaacgatgaagggaacagagatccttgtaacggctgttgtcggtatgatcggtattcgtccgacaattgaggcaatcaaagcaggaaaagacattgcacttgccaataaagagacgctggtaacggctggacatatcattatgccgctggcaaaaaagatgggagtgtccattcttccggtggacagcgagcacagtgcaatcttccagtctttacagggaaatgatcacggagcacttcataagatccttctgacagcatccggcggaccgttccgtggaaagaaatcggaagaactgatggagatcaaggtggaagatgcattgaagcatcctaactggtcaatgggacgtaagatcacgatcgattcatctacaatggtaaacaaaggtcttgaagttattgaagccaagtggttatttaatgtagatgtggatcaggtacaggttgtggtacagccgcagagtatcattcattcgatggtagaatatgtagacggcgcaattattgcagaacttggaacaccggatatgaagctcccaatccagtatgcactgtattatccggaaagaagattccttccgggggacagagtagatttctggacactgggcaaactggaatttgagaagccggatacagacacattctacggactggaacttgcatatgaagcaggaagaaaaggcggaagtcttccgactgtattcaatgcggcaaatgaacttgcagtcagccagttcctcaacagagagatcaagtatctggaaatcacggagatcattgaggactgtatgaaagcgcataagaatattaaaaatccaacgctggaacagattctggagacagaagcagcgacctatgagagaatcaacagcaggaggtaacagtaaatttgggaattatattagcaatcttattattcagcttcatcatattttttcatgagctgggtcatttcttactggcgaagaaaaatggaattgatgtagatgagtttgctataggaatgggaccggcaatctattcaaaagaatataaagggaccaaatacgccgtgcgtatccttccgatcggagggttctgtgcgatgggggaagacgaagaagcgaatgattcgccgaacaattttaataacaaatctgtctgggcgagaatctctgtcatagcggcagggcctgtgttcaactttatcctggcttttatatttgccgtgatcattacagcgatggtcggctatgataagccggtgatcggagcagtagaatcaggctatcctgctgcagaagcaggcctgaaaaaaggtgatgagatcgtacagatgggaaacaaaaagatccatatcttccgtgaagtcagcttttacaatcagtttcattctaatgaggatgtggctgttaccgtgttaagaaacggaaaagaaaagacggtcacactgacaccaaagatggataaagaactgggctataagagattaggaataggaagttccggttatagcaaggcaaatctgttgacggcttttcaatatggcggatatgaagtgaaattctggatatgtacaactgtcgatagcttgaagatgcttgtgacaggccagattggagtaaatgaactttcgggccctgtgggaattgtaagtactgtagatacaacctataaagaaagccgttcttatggagtatttgcagttgtggtacagatgttaaatatggcaatattgttgtctgcgaatcttggtgttatgaatttgctgccactcccggcattagatgggggacgtctggtatttctttttgtggaggcaatcagaggaaaacgtgtgccacctttaaagcacagggtgacagtactcttcgtggtgcagtctatggtctgtatgcaaaagaggacatcgtgcatccggatggaacaacaggagttctgtataaacaggacagcctgatcgcgcagggagtcatcggagatgatggaacactggagttttcagaattataccttggagaaatgtatgtaaaagagatcactccaccggaaggatatacactggatactacaaaatatgaagtatctgtaacttatgaaggtcaggatgttgcagaagtgacaagagaccttacggtaaaagagcaggtaaagaaacaggcattccagttgatcaaagtcagtgaagatggagagcagacagaaacagacctggttgcaggagcaggatttaaggtatatctgatcagcgacctgacacaggtgaaaaatgggaaactgaaaccagaaaacaggtattcgggaattccaacaatccggatggaaatggagaaatataacttaagacagccagaattcttggatgaaagaggaagttttattgtaaaactatataaagaatcaaagaatgattatgaagatatgtcaaatgatgaagaaacaaataatttaatagtattttgtaaaacaccgcgtacaagaaaggaaatttgtgattatctggggttaaattctgttacttatgctatacagacgtatgtaaatccattagtagaagttggcgtaattaagttgagtattccagataagccaaagagtccaaaacagttatattatagcggagaaagagaaaaatgagagacgtaattaagttgagtattccagataagccaaagagtccaaaacagttatattatagcgtagaaagagaagaatgagagaggaacaaggatgaacatacaaatattcggaatcaagaaaagcttcgacagcaaaaaagctgaacgatttttcaaagagcgcggaattaagtaccagttcgtagatatgaaagaaaaaggtctgagtaaaggtgaattcaattcggtatgccaggctgtcggaggatatgaaaaactgatcgatcaggagtgcaaggataaagatctgcttgcgttgattacttatcttgcagaggaagataaagcagaaaagattttggaaaatcaaaagatgatcaagacaccgattgttcgtaatggaaagcaggcaacggtaggatatcggccggatgtgtggaagaattggaaatagatgcatatggagagtgcgagaagatgacatattacaaccgagaagaccaattcctgcgacaacgcttgcagaaagaaatcccgattttacgggcattaatacaaaatctatatgaagaactggacagaaaactccatttgaatggtgcaaaagtgccgataacatttggatatgacacggacacactgggatcttacactagacgaagtgcacatgaaaaagagcattttcatttttcgctgttgtttattgcatatggtgtgaagaatccgctgtccaaagaggatcgcatagatttattcaaacacgaatacgcccattacatgcagtacaatatgcagattcccgaaaagtataaatggcaggcgggaacacacggaagtgcttggaaatactgctgttctctaatcggagcggcgccgacgccgtattataaggcgggcgaagcgcttatgaatcatgactacgataaagtattaaagaacaggattcatgataagtccgtgccggtccgggatacttatcagcaactgaagactgcacagaagaaaaaagatgaagtggttcagtataagcttggcgatgcagtgacacatccgaaattcggacatggaattgtggagaagattaatcagagatctggcggggtgcatttacatatccggtttgatggggaagtgaagtgtatcgatcagaaatggttgtcacggaagaagtatacgtaaaaagatatacgtaaagagatatgtgtaaagagtatatgtgaaaagattcagtaaaaacaaataagcaaggtagtgaagtatctgaagaggataaacgtacacgaagaacgttagaagatgagatgacatttttcgtgtgcgtaaatttatatattgacatactatcaaagcgatactaacataaagataataatataggacgaaaaaagaaagaggtagtaatcatgcggaaaaaatcagaaatgcaaaaggctaacgaagaatttgtaaagacttacgatgattcaaaatatccaaaaccatccgtaactgcagatatcgtcattttcggaatgtttgacaaagaagaagataattacagaaaaatagccgagaaagagttaaaggtacttttaatccagagaggtgcggcaccatatgaaggctgttatgcccttccgggcggattcgttggtccgaaggaaaccatcggcgaagccgcagaacgtgaattaaaagaagagacaaactgcaactgtaatttcctggaacagttcggtacctacagcaatccagaccgtgatccgagaagatgggtgatcagcaatggatacatggcacttgtcaatgctggacaggaaataatccaggcaggagatgatgcttcagatgcaaagtggtttgatgtgtcatttcaggaagaagccggtatatggaatctgtgtctgacacatggggatgagaagcttcatgcaagattagaagagacaacttcgaagtgggatgtaaagaagaaattcaagacgatagaaagtgatgaccttgcatttgaccacgagctgattcttgcagatgcaatcgtacagcttcgcaagtggattacggagacgcatatagcgttccggcttttaccggagaagtttacattgagagaattgcagcagattcatgagacggtgctggatacgaagcttctggttccggcgtttcgaagaaaagtggctgatctggtagaagataccggggagatgacgggggatgccgggcatcggccggcgaagttgtatcgggagaaaagataaactttagtaagaagaaagggctgtgcatactaatgatgaaatttttattcttgatacttttcataattttggaaaaaagaacatttagagcaattgtggcattgccggcaggtattgttacagccgggtatatggaagagattaataaagatgaatctttgtaatttaggagaattgcagatggaagataaagagaaaaagcaaatgcttacaacggagctaacaaaagaaaagagcggcaggagtgccgggatgattcaggatatgtcaataaacggaatcaaactacatctcgctcagaacggaaccggcggcccggttatcttctggggtatgtatccacatcagcagaacgaagtagaacatctgtgggaatctctactggaacttgtgccggaacaaaatttcctgctcgtcgcatttcaggtggaagactggaatcgggatttttcgccttgggaagcagcggcggtattcgggaaggaaggcttcgccggacaaggtctgaagacgctgagatggctgacagaggaatgtgtgccacatattgaccggacttttggtgtgaaagacagggaacattggctgatgggatattcgcttgccggattattcgcgctatgggcagcttatgaaagtgacgtgttttctggaattgtatgctgttcgggttcgttgtggttcccggactgggaccattatgtgaggaatcatgtgattcagagtaaatgtagcgtgtatctgagccttggcggaaaggaagagaaggcgaagaacaaagtaatggcagcggtcggtgacaggaccagggcgcaggaagggctgttacaggaggactcgatggtggaatccgtggttttagagtggaatgcgggagggcattttgcagatgcggggaaaaggctggctaagggcgtgaaatggatgtttggagtgaaaagtggcttataatataagttgagggtgttaaggtttcatggtatcataatcagtatagaagaacagtgtgacagattatgttattacaaccggaggtgaaaatcaatgaacaaagcagacaaagcagaatccctcttccgcacaggctacaactgcagccagtcggtctatgcagcatttgcggaagaactgggaataacagtggaagaggcagcaaaaaaagcaagcccgttcggagcgggatttggcaagctgcgtgaggtatgcggagccgtgacaggaatggtcatggtaatcggtgatctgtacggatatgacgatccgaaagatgcggcggggaaaaagcagctttatgtacttgtgcagaagctttgtggatcctttgaagcttcggaaggaagcctgatctgccgggaacttctcgggctggagaagggcgaagatctggaagagcctgcggtcagaacggaagcgtattatcagagcagaccttgtgtgaaagcatgcagaagggcagcggagattctggaagagtatgtgaaagagcagaaaagaaaatgagtgaatacattacgacctacacaggaaaacattttaaaccaacagaaccggatccggagttatttgacatagcagacattgcacatgcgctgtccctgatctgcagaggaaatggtcatgtgaagatgttctggtcggtcggggaacattgcatttgctgtgcaaaagaggcaaaggcgagaggtctgtcggataggatggtgcttgcatgcctgcttcacgatgcaagcgagtgttatatgtcggatgttccgtcgccttttaagaaggaactgccggaatataatgaacgcgaagaacgtatgctttctatgatttatgaaaaatttctcggttcggacctgacaccggaagagaagatgcagttgaatgcgattgataaggcaatgctatggtatgatctgacgtttcttctgggagagaaacaggagagcgaagcgcccgaattgcatattgatctgaggtatgaggtcagagcatttggtgaggtggaagaagaataccagaggatttttgaagaacagcttataaccgtacagaataaaagaatctaaaatcgtacggataagatagaaaaggaggaatacattatgttacacgaagtatcttttgcgtcctacaacggacgtgaccaggtccagggatggatctatgttccggcttgcaaaccgaagggaatcgtccaggtgatccacggatttggggaacattccagacgttatctgcacatgatatctgccttcatggatgcgggttatatcgtggcagcagacgatcatgtaggacatgggaagacagcaatggtcaataatgtgtggggcgactggggagacaaaggaccgcatacaatgatggaagacgagcatacattgaaaggaatcgtgtgtgaaaaatatccggatctgccatatttcttattcggacacagcatgggatcttttatcacaagagatttcattgcaaaatacggggacgaactggccggggcaactatctgcggaacaacgggaatcttccgcggggcagaagagacgggaaagaaattaaaagaagcgatcgatgcaggacatggagaagaatccgatccgtcatataccggagaactgatgggatggatgtgtgagcgctgtggagaggtcagcatcggaaatgagtggatctgtgccgatccgtatgtacagcgggatcatgccgatgatccgtttgatgcatttaccagaccgaccagcaaccgttcggtatatgatttcatccagatgatgttacagatcgagggaacaaagtgggccgaaaaagtgccgacagacatgccaatctataatattgcgggagatcaggatccggtaggtgagtatggtgtcggtgtatatcaggtaagtaactggctggtacagaccggacataacgtaacgacgaagctgtactcgggataccgtcacgagatacataattatgctgagattaagaacgaagtcgaagcgggtattattgcattcatggacaaggcattataaaaatgtattaggtgtcgggaaggattataattcaaaaaacatagagataaagacataaaaagtacaatagcatttgtgatagcgattgtcgtgatcagtgtagataagaaagacgtaagggaaatttgattttcagggactccggttttatgaaacccggagtcctttttgaaaaaaattattttttgatctctgattggaatgcattgatatcttttgctttacaaatgatatataaagtattatgataaaaaaaacgaaatcttcagggcagggtgcgattccctaccggcggtaaagcccgcgggccgagaggcatgatccggtgtgattccggagccgacagtatagtctggatgaaagaagatgatggtacagttattttaaaagatgaatgtagtgtctgagctctgagatggtgatccatttcagagcttttttggttaacagatcatttgtcagttatatgtaacagatcatttcccctgtaggtatcctgcaggggtttttgtataactaagaaagaaggaagagaaatgacggatcaggaatacatgctccgggcaattcagcttgcaaaaaagggagaaggatggacgaatccgaatccgatggtaggtgcggtgatcgtaaaagacggccggatcatcggggaaggttatcataaaaaatgcggagaacttcatgcagagcgcaatgcaatcgcatcgcttacagaatcggcagagggtgcgacaatctatgttacgctggaaccatgctgtcattatggcaagacaccgccgtgtacggaagcaatcatagaacagaagattaaaaaagtggtgattggttccagggatccgaatccaaaggtggcaggaaaaggtgcacagatattgcgtgaatcgggaattacagtagttcaggattttatgcgggaagaatgtgaccgtctgaacccggtgttcttccattatattacgacgaagacaccgtatgtagtgatgaaatatgccatgacactggatgggaaaattgcgacaaagacgggtgcatcgaagtggatcacaggagaaccggcccgacaggaagtgcagcatatgcggcaccggtatatgggtattatggccggtatcgggactgtacttgcggatgatccgatgttgaatgtccgggtagaaggatggaaaagtccggtcagaatagtatgcgacagcagtcttaggataccgcttgacagccagattgtaagaagtgcaaaagagtaccggacaatcgtggcttatgcaggacgggaagagaacgaagaaataacagaaaaaatagaatggttacatgcgaaaggcgtggatactgtctgctgtccggatgaaaaaggtcagatagaccttaaaaagctgatgacaaatcttggaaatgagggcattgacagcattctgctggaaggcgggggcacgctgaacgacagtgcactgcgggcaggaattgtaaaagaggtacactgttttatcgcaccaaaattatttggtggaaagaacagtaagacaccggtgcaaggaatcggcatcggacttccatcagaagcattgaaactgaaatgtacggatatctgccggatcggtgaagacatcaggataatctgtcaggtatgtgaaaaagaacaggaggggccatgtttacaggaatcgtagaagagaaaggatcggtccgctatatgcagctgaccggagagtcgggagttctggcagtcaaggcgaagaaggtattggaaagaacgaagatcggtgacagtatcgcagtcaatggagtgtgtctgacagttacatcacttcagccggatggatttactgcagatgtgatggcagagaccatcaggagaagcagtctgggaagctgtaaagtcggaagtcaggtaaatctggaacgggcaatggctgcagacggaagatttggaggacatatcgtaagcggtcatattgacggaaccggtgtgatccggtctctgacccgggaggagaatgccatctgggtatctattggaacatcgccgcagatattacatctgatcgtagaaaaaggctccatctgtatagatggcatcagcctgacggtggcaaaagtagaggaagagggatttcaggtatcggttatcccgcatacaggagaagaaacgacgcttttggaaaaagtgccgggcgattcagtgaatctggagaatgatgtgatcggaaaatacgtagaaaggctgttaggccttggaaagagtgaagaagagaaaaaagaatctggaattacgatggaatttttgcaggaattcggattttagaacaggaggataaatagaatgtcacaaaacaatcagtacaatacaatcgaagaggcactaagggatctgagggaaggaaaggttattctggttacagatgatccggacagagagaacgaaggggatctggtatgtgcagcagagtttgcaacacaggagaatatcaattttatggcgacttatgcgaaagggcttatctgtacaccgatgagtgcggaaattgcagcaaggcttaactttccaccgatggttgcggagaataccgataatcacagcacagcatttaccgttgcagtggaccatgttgatacgacgacaggtatttcggcagcagaacgttcctatacaatcatgaaatgtgtggatgaagatgcgaagccggaagatttcagaagaccgggacatgtatttccactcattgccagaaaaggcggagtcctggtgcggaacggacacacagaggcaacgactgatctggtgagactggctggattgaaggaatgcggcgtgtgttgtgagattatgaaagaagatggcacaatgatgcgtacaccacagttgtgggaacttgcaaaagagcataatcttacatttattacgatccgtgatcttcaggattacatgagaatccatgaaaaacatgtaaaagaagaggcggttgcagaccttccgacgcagtatggagatttcagacttcacggatatatcaatgatattacaggagaacaccatcttgcactggtaaaaggtgatatcggagacggtgaagatgtactttgcagggtacattcggagtgcctgacaggtgatgcatttggctcgcttagatgtgactgtggtctgcagcttcagacagcgatgcgtcaggtagaagcagaaggcagagggatcattctttacatgaggcaggaaggcagaggaatcgggctgctcaataagatcaaggcatatgcactgcaggagcagggatatgatacagtagaggccaatgtaaagttgggatttgcaccggatctcagagagtattggatcggagcgcagatattatcggatctcggagtgaagtcattgagacttctgaccaataatccggacaaagtctatggacttggtgggtttggactgaagatcaatgaaagagtaccgctggagatcccaccgcagaagtatgatctgaaatatatgaagacaaaacaggaaaagatgggacacattttcaaagaaatagaattataaaaagatttaatgaataacaggaggaagaaatcatgagacagatcaatttagtagaaggaaaagtagtagcacctgagggaatgaaagtcggaatcgtggctgccagattcaatgagatcattgtgaataagttattgggcggagccgtcgacgggctggtaagacatggggtagaagaagagaacattacggctgcatgggtaccgggagcatttgagattccgctgactgcacagaagatggcacagtccggaaagtatgatgcagtcatctgcgtgggagcagttatccgcggggatacttcccactatgatctggtgtgtaatgaatcggccaaaggaatcgcgcaggttgaacttgcaacaggaattccggtattattcggagtgatcacaacagagaatatcgaacaggctatcgcacgtgcaggaagtaaagcaggaaataaaggatatgactgtgcattgtccgcaattgagatggtaaatctgatgaagcagctttaatcaggtgcagccgatggtgaaaacaatcatttttgattatgatggaacgatacataatactcttggaatctatgagccggcgttcagggaagcttatcagtggttgtcagaacagaatgttgtagaggaacagaagatagagacggcgcagatcgcaggctggctgggcttaaacagcaaagaaatgtgggatacatttctgccggaattagatcagaaatacaaagatcaggcgagtgcgatcgtgggagattccatggtcaggcagatcaggaagcaccgggcagtgtggtatccgggagcggaagagatgcttacagctttgaagaacagaggatatcatcttgtgatcttaagcaactgtaaagtggcataccgcaaagcacattgggaagaattccgaatggaaagatggtttgaacagttttatgattgtgaatcgtatggtttctgccctaagacggagatcgtgcaggaagttatcagggactatccgggttcctatctggtgatcggagacagaagacaggatttggaatgtgccagatcctgtaaaagtccgtttatcggatgcctgtatggctatggtgagaagggagaactggatggagcagattattttgtgaaatctgtagaagagataaccggaatcatatgatgtgaaaaaatgcacaaaaatagaactgtatttttgtaaattatgtttaattccactcttgcactttacaagaaaaaagtgtaaaactttaagtaagctaaaaaaagtaaataagaaatgcaatgaaagggatatgtcataaaagttaactggaattcagagagctgttggatggtgtgaaacggcagaaagtattttatgatatcacccaggagcatcccgctgaatatacaggttggaagaatcaacatagtcaggtatcgagtaagccgggacgttgtcttcacgttacagaagaaactgttagatattttgacagtaacaagtggttgtggttagtgatgactgcagtaaaacgaagtggtaccacggaagaatattccgcctttgttatccgaaaggatagcgaaggcgtttttttatatatttactttaaatagaaagaagagggattgttttatgagtggaatattaatgatgatcattgccattgttgtgcttggtggagcatatcttctttatggtcgttatctccagaacaaatggggcattgacccaaatgccaaaactccggcatatgagatggaagacggggttgactatgtaccggccgatacgaacgtcgtattcggtcatcagtttgcatcaatcgcaggtgcaggtccgatcaacggaccgatccaggcagcaatcttcggatggcttccggtacttttgtggatcttaatcggaggagtattctttggagccgttcaggatttcgcatctatgtatgcatctgtaaagaataaaggacgtacaatcggatatatcatcgaagaatatatcggaaaattaggtaagaaattattcctgttattctgctggctgttttgtattctggtcgttgcagcttttgctgatgttgtagccggaacttttaatggattctcagtaagtgaagccggaaaagtaacaaaaattgcagctaacggtgcagtcgcaactacttctatgatatttatcttagaagcagtcggacttggaatgtttttgaagtatacgaaatttaataagtggattaatacagcagttgcaatcgtattattggtagcagcaatcgcactgggacttcacttcccaatgtatgtaggactggatgcatggcatctcatcatcttcgtttacatcctgattgccagtgtcgctcctgtatgggcgcttcttcagcctcgtgactatctgaatagttaccttttgatttttatgatcgttggtgcggttattggtgtatttgtagcaaatccatcttgtaaccttcaggcattcacaagctttaacgtagatggacagtatatgttcccaatcttatttgtaacgatcgcttgtggtgcggtttccggcttccattcactggtatcttccggtacagcatccaaacagattaagaatgagaagaacatgcttcctgtatcattcggagcaatgttaatggaaagtatgcttgcagttattgcactgatcgcagttgcatcttttgccaaaggtgaagcagcagcacagggactgacaacacagcctcagattttcgccggagcgattgcgaacttcctgtcagttattggtctgccacattcacttgtattcacactgattaacctggcagtatccgcatttgcattgacatcactggactctgtagccagagtcggacgtctgtcgttccaggaattctttatcgatgacgatacagatatggatcatctgaatccattcatgaaagtggtaacaaataaatactttgcaacaatcattacactggtacttgcatatttcctgaccaaagtcggatatgcagagatctggccactgttcggttcagccaaccagctgttatctgtactggcactggtagcctgcgcagtattccttaagaagacaaaacgtcagggatgtatgctctggattccaatggtattcatgatggctgttacatttacagcacttggtatgacgatcgtgaaactgacaaaagcattcctgacaacagggctggatcttggaaatacattacagctgatttttgccgtattgcttctgatccttggtgtgttggttgcaatccagggtgtaaagaaacttcttgaaaaaacagatgataagaaagcaacagcttaatcattattttattcgtaataagaacatataagagaaactgtggtaatagcgtgaaggttattatcgcagtttttttgttttatattatatatagtagagacagattctgcacaattggataaaatatataaaaaaacatagatcaatataaaaatattgataattaatccaaaaatattctatgtcaaaaaaatagtgttgtaattataatgagattagtcaatgagttagacgcgattaaaaacaaaacgcacaaaacaggaggaaagaaaatgaaaaagaaaaaagtatttgcactcatgatggcagcaacacttgcattatcactggcaggctgcggaggatcttcgtcaggtgattcaaaatcatcaggatcttcagacagcagttctgtagccaataaggacaaaccgctttgctggtttaaccgtcaaccttctaatagttcaacaggggaattggacaaagaagcgttgaatttcaacaaagacacttattatgtaggatttgatgctaatcagggagcagaacttcagggagagatggttgttgattatatcaaagcaaatgctgataagattgacagaaatggtgatggagttatcggatacgtacttgcaatcggtgacatcggacacaatgattccatcgcacgtacacgtggtgttcgtgcggcacttggaacaggagttaaggatggtgacgaagttgcttccaagccggcaggaacaaacgtagacggaaaagcaaaagttgtccaggatgctaagattgatgtaaacggaaaagaatttacagtccgtgagcttgcttctcaggaaatgaagaactcagcaggggcaacatgggatgcggctacagcaggtaacgcaatcggaacatgggaagcttctttcggagatcagatcgatattgttgtttctaacaatgatggtatgggaatgtcaatgtttaatgcatgggcaaaagataacaaagttcctacattcggatatgatgcaaacagtgacgctgttgcagcaatcgctgaaggatatggcggaacaatctctcagcatgcagatgttcaggcttatctgacattaagagtactccgtaacgcacttgacggagcagacgtggatacaggtattggtacagcagatgatgccggtaactgcctgaaagaaggtgaagattacagatacagcgaagaagaaagatcttactacgcattaaatgttgcagtaacagctgataattacaaagactttacagattcaacaaagatttatgacaaagtgtcaaaacagcttgattcaagcaagagtccatctaagaaagtatggcttgatatttacaatgcatcagacaacttcctgagctcaacataccagccacttcttgagaactatgatgatctccttaacctgaaggttgattacatcggtggagatggacagacagagtcgaacatcacaaaccgtctcggaaatccaaacgaatatgatgcatttgcaattaacatggttaagacagacaatgcatcagcatacacatcacttctctcaaaataagagactggttaaatggtaaatgaatgaaacgcagaggggtgtcagagatgatacccttctttcatcaagaaaaggaagcagagttatgacagtagataagaataaatacatcttatcgatcaatggcatgagtaagtcgttcggtagaaacaaagttctgaaacatataaacctgaatgtcaaacctgggaccattatgggacttatgggtgaaaacggtgccggaaaatcgacaatgatgaaatgtctctttggtacttatcagaaagatgaggggacaattatattagacggcagagaagtaaatttctcgggaccaaaagatgcactggaaaacggagtagcgatggtacaccaggaattgaaccaatgtcttgaaagaagcgttgtagataatatgtttcttggacgatatccaaagaattcttttggaattgtcgatgaaggaagaatgaaaaaggaaactgcaaatctcttcagacagcttggaatcacagcaaatctgacacagccaatgaaaaaaatgtctgtgtcccagcggcagatgtgtgagattgcaaaagctatttcctatcattccaaagtaattgtactggatgaaccaacctcatccctgacagcaccggaagttgagaaacttttcaagatgatgcgtcagttgaaagcacaggggatttcgctgatttatatatcacataagatggatgagatattcaatatatgtgatgagatatctgtgctcagagatggtagtctggttatgacaaaagagtgcaaagatacagatatgaatgaactgatatcggcaatggttgggcgctcgctggataacagatttccacctgttgacaatgagcccggagagaagattctctctgtacagaatctttcgtcaaaatatgcaccaaagattcaaaatgtatcctttgatatcagaaaaggagaaatatttggattttacggtctggttggtgccggacgtacggaacttttagaaacaatcttcggaatccgcacaagagcagaaggaaatgtaatatacgatggaaagattatgaacttttcatcgccgagagatgcaatggatcatggatttgccctgatcacagaagaaagaaaagctaatggtctgttcttaaaaggcgatattacatttaatacgaccatcgctaacatgaaccattataagaatggtgcagtgctgtcacatgacagaatggtacgtgcaactgcggaagagattaaaatcatgcatacaaagtgtatgggcccggatgatatgatcacaagtctttccggaggaaatcagcagaaggtaatcttcggaaaatggctggagcgttcaccgagtgtattcatgatggatgatccgacacgaggaattgatgttggtgcgaaatatgagatttacgaactgatcatcaatatggcaaagcaggggaaaacaattattgttgtatcttctgagatgccagagattcttggtattacgaaccgtatcggtgttatgtcaaacggacgactggccggaatcgtaaatacaaaagagacgaaccaggaagaattattgagactcagtgcaaaatatctgtaacagagaggggtatggaagatggcagaaaaaagcattatcatttcggctgaagaagaagcaatacttttgaaaccgattgacgaatatgttggaaaaatacaggagcagatcgatgcactacgtgtggaaggatctgacaaagtcaacagtttaaaaaatcagattgcaatagcaaaagagaataagaacttaacaaaagaagaacagaataagattatcggggaatgtaagaagaatctggagaaggcaaaagcaacagaagatgcaaataaacagcagattgcaaaactgatcgcagatgctgaaggttttctttccaaacattacaacagtgagtattataacattgttgcaaagagctgcgaagcagagaaaaaagcggaaaacagtaattttgaaaaattaaaagcggatctgcaggaagaacataagaaggcagtcagcagcctgaaagatgcagaagagatcaaagctgaaaaatacacatataagaataaattatatgatgcgcagatgacacatgaatccaggatccaggagatcaaggatagaaaacatgatgcatacatgcataagttccacctgatcgatctgctcagaatgtcaaaatatacatttgcacagaagcaggcacagaattttgaaaattacaagtacacatttaatatgacacagttcttgtataagaacggtctgtatattgtaattatcatgatctttatcgcattgtgtattattacaccattcgtgaaaaatacacagctttttacaaccacaaacatccttaacattttgcagcaggcttcaccgcgaatgttccttgcacttggagttgccggtctgatccttctgacaggtacagacctttctgtaggacgtatggttggtatgggtatggttacagcaaccattatcatgcataacggaattaacacaggtactgtgtttggacatgtttttgatttttcgggtatggcaccggcatcaagagctatattagcattatgtgtgtgtatacttttcacaactgtatttgcaatgacagccggatttttcatggcaagatttaagatgcatccatttatttcaacgatggcaaatatgttgatcatctttggtcttgttacatatgctacaaaaggagtttcttttggtgcgattgatccgacaattccaaatatttttattccacaggcaggacgttttccgatgattattttatgggcagtagttgcgattgctgttgtatggtttatctggaataagacaacatttggaaaaaatttatatgcagttggtggaaatccagaggcagcagctgtatcaggaatctcggtatttaaagtaacgatgggagcatttatccttgcaggtatcctttatggattcggttcatggctggagtgtgtacgaatggttggatccggtagtgccgcttacggacagggatgggatatggacgccattgcagcctgcgtagttggtggagtttcctttaccggtggtattggtaagatatcgggagttgtgacaggtgtactgatctttacatcattgacctattctttgacggttcttggtattgatacaaaccttcagtttatttttgaaggtatcattattctggcagcagtaacacttgactgtctgaaatatgtacagaagaaataataaataaaagactgtttatacaggtttatacaaaaagaagtagaccgtcctgctcatcggaaagatgaaagggacggttttttcaacatgatgcgttcgaaaggaatttgtgagtaaaaaaattttgaaggcagattttgtatttggatatgttataagagacgtaaatttgttatactggaataaatgtatagcggccatgaaaaaggggaaaaagatggaacgatataaagtgattctcgtagatgatgaagccgaagtcatcgatatgatagagaaaaaaattcattggaatgatctggggtttgaggtggcaggaagtgcgacaaatggggtgaaagcactggaattagtagaaaaactccagccggatgtggtgctgacggatattaagatgccttatatggacgggttagagttatccagaaggctgaatcgggaatatccgaatatttatatcatgctctgtacgggatttgatgagtttgaatatgcgaaagaagcagtgcatttggaaatcaaggaatatatgctcaaaccggtcaatgcaacagaattgtcagaaagtctgactaatctgaaacatacgctggacagggaaagagaagaaaaattaaatgtaaaaaaattaaatgattattttcaggaagtacttccgaaattacagtccaatttttttatttcattaattgaaggaagagtagaaaaaaaggattatgaaagatttttacaggcgtatcaggtagatatgaaaggacctctctttggctgtgtaatcttccacacatcggagaaccatgtgcccgaaggcatgaacccactgcttttatccatgtcggtagaaagagagatcaagcagagactgatggatcagtggaactgtcgagaatttatatatatgggaaatacactgctgattctggaactggatgcggaagataagattacccagataacagatgcctgtgacagattctgtcggtgggcgtaccgcatcatgggtgcagttgttacagcgggaatcggaaccgtgtgtgacagcctgtatgagatcagtctttcctatgaacgggcaagagaagcagtttcttacagggttttatacggaacaaaacgggcaattaatattggagagattgttccgaaggaacagatcaaaccggttcagtcagaagagtcaaggatgcagacgctatttcgtgcaattcgtataggagattcggcagagatagagcgggcagcacatggagagatggaaaagcttcataaaaatacagaaaccatgagtcagtataatcttgctacaatggagatcgtcagtggattttttaagttctgtacagataattcgctggatttcaataaaatatccggtaatatgcagaatatttacgaaaaagtatcgcagatggatgagagttcactgacagcatggattgtgcagatgtcggaaacgatcagcgaaaagctgaaatgtgcaagaaatagttctgccagacggctcattgtggaagcacagagcattgtgcaagaaaggtatatggaggcggatatatcattggacgaggtatgtgcggttctcggtgtatcgaattcttatttttcttctgtatttaaaaaagaagcgggaaaatcgtttatctcttatttaacagattacagaatggatattgcggcagagatgatattaaatacagatgagaaaagttacacaatagcagaaaaagtggggtatctcgatgccaattattttagttatgtatttaaaaagaagttcggagtttctccttcgaagtatagagcatctgtaaagtagaacagtaatgcgtatgaagggaacaggaaaaagagtgaaaaaaagaaaaaaagattcggatttaaaagaaaatgttgtatttaatatacagtcgatcatcatgtctgttcttatggcgattacacttgtcacgattgtaactatgggattccttttgtatcaaagatttaagcttgcgattgataagatggcagtatcaaatacagaggcgacggtggaaagcacggtagacagggtgaattcggacctgttagatatccggcagatttttgatgcagcgaattataatatcgttcaggaatttgatatatccagcgaaaaatttgctgaacagttcagcttattatatgaggtgaattcggataaaatcgagagtctggcattatatgggaatgaaggccgattgattgcttcggaaccggttgctgttgaaaaagaaaatatagatgtaaaaggacaggactggtataagaatgccgagagtgcaattgaaaatgtacatttttccattccacatattcagaatttgtatgaagatggtctgtatcgttatcattgggttgtttcactgagccgttacgtggatataaacgatggggagattccgggaagcggagtccttcttgtagatatgaaatattcggtgatcgaagatgtcttaaagcagattaatgattcttcggaaggaatctattattatatgatcagtcgtgacggacagatgatctatcatccgagaaaaacagagatggccagaggactgtttgaagagaatagtctgaaggcttccgggtatgaggagggcacttatgagatcacaacaaatggacacaaggaaagtgtagtggttggcaacattgcctatacaggatggaaactgatcggagttgtaccggagagcgtgcagactgcaagaattaacaatttcagatattatatctttacaacaatcatgattcttatgatgatgcttctggaaggaaacaggctgatttccagaaaaatatccaaaccgatccggaaactggatgaatcggttaaaacatatgaagcaggaggaaaaacggatatttacataggaggttcttcagaaatacgacatttgggttattctgttcaaagatcatatgaacggattgagacgcttatgggggaaattatccgtcagcagaatgaacggagaaaaagtgaactggatgcattacaaagtcagattaatccacattttctctataatacactggaatctattacctggatgatcgaagcacagaaaaatgaagaagcagttattatgatctccgaactggcaaagcttttaagagtcagtttatcccgcggaaagacgatcattccggttaaagatgaacttcagcacagcagaagctatatgaatatccagcttatgcgttataaagaacgttttcaaatggaatttcagacggataaagagatagaagattattgtattgtaaaattagtcattcagccgattctcgaaaatgcaatttattacggcgtgggaaatatggatgaggacgatgaaggaaaaatcacagtccggggagaaaagaaagaagacgatatttacattattatagaagataatggaatgggaatgcgaaaagaagttctggaaaatatcctgaaagataacaataaagttccaaaacatggttcgggtgttggcgtgatcaatgtgcattccagaattcagctgatgtttggtgagcaatatggcctggagatatatagtgaaccggatgaggggaccagggttgttatccatataccggcaattccatatacaaaggagaatgcggaacaattggagatgcagaaatatatacaggggagggatgtagatgaaaaagaataaaattacattcctgatactggagtgtattttcctgatactgacattattttttgcatggaagatttttgaccgggatgtgccggaaaaacgagtggcggtgatcttaccggaatcaggagataaccggtggaattcactgattaaagggatgaagcagtcggcgaaaataaacaatcttcatatgattatctgtaatacagatgaaattgaaaatgcagagatggaaaaagaaattataaaagagcagaagcacaacaatatagatgcatttatcatatgtccggcaccgggaagtgatacgaaagacatgttaaaaaaacagtgtgccaagacgccatacacactgatcatggaggatgtatattccaaagaaggcgggaattccggtaatccggtaatcggaccggattattataagatgggttctgaacttggaaagcagctgggagagaagcggcagaaaatcggagttgtcacaaactggaaagaatcaaagtcagatcaggatgcgatccggggattaaaggattcgctgaaagatagcaaaagtgagatcgactggtattgttaccggaaaaaagatcagaatatctatgaaaaagtgagtaaaaaagataaagtagatgcaatagtggttctggatccacatgcattggaagaactaggcgagcagtctgatgaagattcatatcagggagctgacatatatggcattgggagcagtgtaaaagcggtagtgttattggataacggaaatatccagggactggtggttccggatgcctatgagatcggatataaaagtgtcggggaaatggcacaaaagctggaacacagattctacaggctaaaaggccataagacagagataaaggtgtttgacagagatgaattttcattaaatgataatttggaaaggttcttatattcttatgagtaaaaaaaacagaaaaagaagaagtatgatagcagttatcctgctgattgcttttctgattaccggatgtgaagacaagagtgtaaagacagatcatatcatccggataggagttgtaacctatacgcaggatgatccatttatcaatgctatgacggatcagttaaaagagaatctgaaaaaaatggaaacagatcatatgaaaatcatcacaacggtaaaaaacggcgatgataatcagcaggatcaaaatgagatcgttgaggagatgattgacgccggctgtgatgtattgtgtgtgaatctggttgacagaacggcaccatcccgtattatcaggatggcaaaacaagaagatatcccggttctcttttttaacagggagccggtcagggaggatctgatgcaatgggagaagctgtattatataggatgtaacgcagagcagtccgggatcatgcagggagaaattgtggcggattatattaagaatcatccggaagttgataagaatcaggatgggaagattcagtacatacttctggaaggagaggccggacatcaggatgccatcagcagaacagactattcggttaagaccttgcttgaacaggggattaatcttgaaaaattgagctatcagtttgcagactggaaccgtggacaggctgaaaacaggatgagtcgtcttattgaacaatatggagatgagatagaactggttatttccaataatgatgagatggcactgggagcagtggaagcctggcagaaggccggatatgactgccggaactggcctgtcatatttggaattgacggtctggacgatgcgctggaggcaatcaagactggaaaaatgaagggaaccgtctataatgataaagaggatcaggcaatggaattggcgaaattatcggtagagattgtctgtggaaaagacacaaatcggaaacatttaaaggaaggcagatattatgtctccgaatattgccgtgtggatagcagtaatgtagatcattttttgaaataataatgaggaaatagaaaatggataacgcatggataattgcattttacaaagaaacagatccggtaaaaagactggagttattaaaagcaaataccggcgacggagagtcggagaaagacaaataccggaaacagttatggattgcaagatatggaaaacgaacacccgtaaaagatgaatttatgagatgtcttatggaaatgaaatatctggcagagggtacgacagtggatctgggaggaaaacggagaaagcagggagcgaagatagctgccactttggggctgtcagaatcactgcttcaggaaaaagtatataaggaaattcttttgcaggagcttcagaatgtctttctgaaattcattgaagtcagcaggggaggaagagcatttacgtcacttgtatttggaatgggacagatgtcagaagaaggagtgacaaaaaagattgcgcagcagattagtatgatcgctttccatgcaccgcatctgcttcatatggagaaagagtttgcgttgttacaggaggcggcgcttgaggctttcaggaaggtatatccgaacagggaacatttcctgaaaaaataaagatagcagtcatgtatagcaaataagaaagaacaaatgttcgaaaaacacttgaaaacaagaacgcttgtttgtataataaaactatgaatatagaaatcaaaaacagtaattatacaacacaggagaaattacagattctcgctgatgcggcaaaatatgatgtagcatgtacgtcaagtggttccagccgccgtggaaagaaaggagaactcggcaatacagaggcatgcggcatctgtcacagttttgcagcggacggaagatgtatttctttattaaagatcctgatgacaaatcattgtgcctatgattgtaaatattgcattaatcgtgcaagcaacgatgtgaaacgggcaacatttacacccgaagagatctgtgaactgacgatcgagttttacaagcggaattatatagaaggccttttcttaagctccggagttttgaaaaatccgacatacacgatggaaaagatgtgtgagactttactgctgcttcgcacaaaatatcattttaacggttatatccatgtgaagacgattccgggagcttcggatgaacttcttgcagcggcaggatatctggccgatcgtatcagtgtcaatctggaacttccaacggaagaggggcttcggactcttgcaccgaataagacaatgaagacaatccttaatcctatgggaaaggttcagaatacaattgctgcacaccggatggccatcggaaagacagcatatatggaaagaagcaagggaaatcaactgttagataacggcattttttcggaaatatccaaaaggaattatcgggaaagcctggaagaaaaaaagaagacagacagactgtcggatggaaaggacggaactttgccttctcaaaaagaaatggggagagtggatggactccttacatgggacaatgcatatcagttagcaccccatgatatgtctggtttaaagcgtcgttttgcacctgccgggcagagtacacagatgatcatcggtgcgacgggggaaagtgactatacattattgcagacgacccagcagttgtatcagggctttgatctgaaacgagtgttttactcagcatatattccgctgaatgaggatgatgcactgccggggcttggaacaccgacaccgcttttgcgtgaacaccgcctctatcaggcagattggctgcttagattttatggattccaggcaggtgaattattgtcggaagaaaagccggatttcaatgaactgatcgatccaaagtgtgactgggcattacgccatctcgaacaatttcctgtggaaatagagactgcaagttatgcaagactgcttcgggtaccgggaatcggtcccaaatccgccagtcggatcacacatgcaagacagtatggaagactggattttgcaagcttaaagaagatgggtgtggtacttaagcgggcgcattattttattacctgtgggggaaaacagatgtatcatacaccggttgaagcatcgtatattatgagacaactggtgagtgtagataagaaagatgtatggaatatagaacattccaatgaatcttatgtgcaattgtcgttggcagactttgggatagggtaggaaattatgaagatatatacttgtaaggatcgtctggaggacattatgacctgcatctatgatgcctggtcggaagctttacgaatcggccatgatcagatacaattaaagaaagaaccgatattacagcagacaatgtttgatgaatatgtccatgtagacggagataatgtgaaagcagaaaaagtaatccgttctgttcgcagggatatttccgatgaagcatatctggatgtatattatgcaaccctttctgcggaggaagatgcgttacaggcaatctataattttctgcgtgtcggatttgcagtgggaagtaaggtactggaacagtattcgaatcctcatgtgatgcgcatgttggaacttcggcggaaagtcggtaatgaaagccatcattttaatgaatttgcacgattccagtcgctggacagaaaggtctatgtcagtcatctggaacccaaaagtgatgtgatcatgctggttggcagacattttgcggaccggatgccatcagaacattggatgatcatagatgataaccggaaaacagcatgcgtacatccaaaagacggaacaaactatctgcgttatctgacggatgacgaatttgagtcacttcataaaacagaacagtatgaagatgaatatacagagatgtggaagacgttttttcaggcggttgcgatcaaagagagggagaattatgtgtgtcagcggaatttgtttccaatttggaagaggaagcatgcggtggaattcagaacgctaaggatatgagcataaaaacttgcgaatcctgaaagaaatatctgtcaggaagagaatcattgaaaggggaacaaatcaatgcagcaaaatttaaaagtgttaatgttaaatggaagcccacgggctaatggcaatacatctgttgcattaaaagaaatggaacaggtatttaaagataacggaatcgagacagagatcatactggtcggcaataaagatattcgaggctgtatcgcctgtggttcctgctatgagaaaggcaaatgtgtattcaacgatatggtaaatgaactggcactaaagtttgaagaagccgatggacttgtcgttgcaagcccggtatattatgcgtcagcaaatgcgacactgattgcctgtcttgatcgtttgttctacagcagtcattttgacaagacgatgaaagtcggagcaagtgttgtatgtgcgagacgcggtggttgttcagcaacatttgatgaattgaacaagtattttacaatctccggaatgccggttgcatcaagccagtattggaacagcattcatggacgtatgccgggtgagtcagagcaggacggagaaggaaaacagacgatgcgtacacttgcaagaaatatgacattcttgatgaagagtattgcgcttggaaaagaacagttcggattaccggaaaaggaagaacgaattgcgacacattttatacggtaatgggattggagaaaagcaaatgacagatacacatatttcagaaagatatgaatttagaaacataaaacagaacgaagcagaagaagcggcagagattgaaagaatctgctttccaccgaatgaagcctgctctaagaagcatatgaaagaccgtgttgccggaattgcggatttatttctggtagtgattgataaagaaaatggaaagatggcaggttttttaaatggacttgcaacagacgaggtcgtattaaaggatgaattttttacggatgcaggtctgcataatccggaaggaaagaatatcatgctgctgggtctggatgtactgccggaataccgcagtcaggggcttgcaagagaactggtacgccggtatctcgaaagagaatggggaaggggaagaaaagagattatccttacctgcctggaatcgaaggtagcgatgtatgagaaattcggatttaaagataaaggaatcgcgcagtcaacctggggcggggaagaatggcatgagatgagtgtaagaatttaattaccgaagcacttggaagaatcaaagggaaagattttgcagaagtattgcagaatctttccttttgtgttattgtaaattaactttaaagaaaagtttcatattcctaaaaattctaagcccgagggcatctcatttcggtatttcaaattcgaaacaattatccgatatgaagacatagtaactaataattttatattgctgggatacaaggaggagctgtctatgatgaataagctgcaacagtattttccgatgattcggacaaaagaagaagttttaaaagaaattgagaataattcaaagctgaaagaaatctatgaaaattggcaagaagatgaaagagaagaatttctggcttttgtaacaggaacaaaaggtgtaaaaatgatgtatgatttcattagtaaagctattttgaatccagaaatttatgaagaaagagtagaagaatttttatcgttgttgcttcaacagaaagtgaaaatacttgaagtactgccgaatgaagagacgggactttcggatgggtattctattctgattatggatatcgtggtagaattagaaaacggaagtattgtcaatctggagatacaaaagaatggttatatgtttccgggagaacgaagtgcatgttattcagcagatttgttattgcgtcaatacagaagagtgcgcaaaaagaataaacaagaaggaaagaaaacaaaatcatgttatagagatataaaagatgtatacacgattgtcttgtttgaaacaagtccatcacagttacacaaatttagagatgtatatttacatcattttgaacagaaatcagatacaggagcggaaatgaatcttctacagaaatatttatttgtaacgcttgacaactttcgtagtattaagcacaataaaagtagtaagatgattataaataatcggctggaagcatggcttgcgtttatgtgtatggatgagccggatgatattctgagtatcatagaaaaatattcggattttaaagaaatgtatgaacaaatctatgtgatctgccgtgatttagatgaggtgatgggaatgttttcaaaagaattacaggaactggaccggaatagtgtagaactgatggtagatgagatgcagaaggatctggataagacaagagaagaactggaagaatcaaagatggaaatagaggagaaagatcagcaattaaaagaaaataaattacaattaaaaaaaatgcaggaagaattagaacactggaagaaaatgtatcagcaagagaataaatagacaagaacacaggaggttattaacgtgagaaaaatagtaaatataaataccacatcaacaaaagaagaacagttaaaagacctgataacatccatccaacaagtaaaagattctctggtaaatatactggatgaatatgaagaagccggtgaagtggataaagcagacactctgacggaagcgttggatgcattggaagatgcatacgatgtggttaatgatgtactgttagatgactgataaaatagtctggaagctatagtctgaaatcagaaatgaatccctgaaatcacagtaaaacgacaaatgactgtgatttcagggattttttttccatacgttcgaaaaagctgttattggcaattttaacaaaaatattatctcatttacaaataaatccactcagattcttgacgactttactaaaaaatgtaaatatagaaaacgtcgttgacaaaaagcaccaacacagctagaatgaactcaacaagaaacaatacaagttgtactatcaagatgtatttggaggaagcagcaaatggaattaagagacaagatagcaggagcattatatgggatggcactaggtgatgcgatgggcatgccggcagagttgtggggacgtgaaagagcaagaaaatttttcgggggaaagattacaggatttatcgacggaccgaaggaaaatgacgtggcatttaactacgacaaagcgcagtttacagatgatacaggccaggctctggtacttctggattcattaaaagctacagattataaaccagatgcggcagacattgcaaagcgtatgttggagtgggcagagaaggaaaatgcatttgaaaataacattctcggaccgacatcgaaggtagctttggcgaatttccgtgacggtgtggatgcaagtgcgatcacgaacaaagcattatccaacggaagctctatgagaatcgcgccgatcggatgcttatttacaccggatcagagaacagagctgattgattatgtatacggtgtgtctcaggcaacgcataccagtgatgtgacaattgccggagcagccatgatcgcagaaggtgtggcatctgcaattgtaaataatgattttgagcaggtattaagtgacatcctttcggtagaagaagcaggatatgaaaagggatgcgagacattcagtccaagacttgcggaacgtgtgaagatcggtgtacagatcgcaaaagaatatgcagacgatgcagatacattttcaaagaaaatctatgatgtgatcggatccggtgtgggaatcattgaatccgttccggcggcaatttccattgcatattatacacaggacccgaatgaatgttgtctgatgtgtgcgaacctaggcggtgataccgataccatcggagctatggcaactgcaatctgtggggcatttaccggatactcaaagatcaatccggaatacacggaactcttaagagtacagaattcggagacggattttgatgaatacatcaacattcttaaaaaaggaagggagttggcaggatgcggacgctagtagtcggtgcggcaatcgtcgatctgatgatgaagatcgaccggcttccgaagagcggggaagatattccgtgcagagagacgaagacggtagtcggcggctgtgcctataatgtggcaaatactttgcgaaacctgcattgtgaacatgatctgtgtgtaccggtcggaaccggatcatttgcagatattatccgcagaggaatgaaagaaaaaggatacgaaccagtgattgaagaaccgagtgaagacaatggatactgcttaagcctggtagaagcggacggtgaacggacatttattaccgttcagggagcggaatgccatttcaagaaagaatggtttgaccggattgacatgagccgatatgagaatatctacattgccggttatcaggtgtgtggaaacagtggaaagattattgctgactggttgcagaatgtaccggatatagataaaaagaagatcttttttgcaccgggaccgatgataacagagattgaacctgagacgatggaaaagttgatggcattaagtccggtgcttcacatcaatgaggccgaggctgggaactacaccggtcaggaacatgtagaagacgcagtgaaggatattttcgcaaaaagtcagaataccgtatttgttacacttgggggagatggaacgatgttctatgatggagatgagattcagaaagtggcatcgttcaagacggaagtcgtagatacggttggcgcaggcgacagccatatcggagcagtgatcgcaggactttcaaagggaatggaagtaaaagctgcagtaagacttgccaaccatgtggcagcagcggtcgtaggtacatccggaccggttatggattacgaggaatttcaaaagatttcggaggaatgggaaaatgaataaaattaagaacttttttgcggattggagctggaaagaaaaagcgtggctggcattcgtgctgatcgtacagacagttgcatggggcatccagaaggaaagcgcattcatgctgatcatgacactgacaagcagtctgaacctggtactgggagcgaaaggtaaagtcgcaggtctgtactttgcaatcatcaacagtgcattgtatgcgatcaactgtatgggaattccgctttacggagaggttatgtacaacctgatctactcgattccggtaagtgcgattgcaatcttcacatggaagaagaacatgaccaaaggcggcgaggtcaaattccgtaccatgacaccaaagatcatggttacaacagcagtggtaacgctcgttggtgtgttaggctacatgcagatcctgaagtggatgggtggaaatcttccattcatggattctctgacaacggtagtatcggttgttgcaagcttcctgtatctgcttcgtttctcagagcagtgggcaatgtgggcaatcgtaaatgcattgtcaattgtgatgtggatcatggtatttatgcagggtgattcatccgcgcttctgatcatcatcatgaagtcgatcaatttcatcaattctacatacggcttcctgaactggagaaagattgcgaaggaaaatgcacagtaaatgtatcgtaaagaataagaaaaatctacatgtaaaagagattctatgttaaaataaacaataggatcgtcatagcagccatggatttcaagaaaatatgaggttcatggttgtttttatgccaatgcatgcaagaaaagttgccggtggcaagttttatgtataccaaagcatataagagaaactgctggcagcaggttctatgcataatcgtggaacacaggtggaattcaatatgactaaatacgaagtaataaaaaacgaaataaaagaacagattgaggataatatactaaaaccaaatcaggtgatcgcctcagaaaatgagatgtgcagacattacgatgtcagtcgtgtgacggtacggaaagcaatcgatgaactgtgtgcagagggaattctctaccggatcaaaggaaaaggctgcttcgtcagggaactgaaggatcagaaacgttcacatatttacagtttcacggaagctgtaaagaacgaaggaaaaacgccttcgaaaaagcagttatcattgaaaacgatgaatgcggatgcatatctggcagagaaacttcagatcaccgaaggggatgaagtatacgagatacggagcctgtattatgcggatggggttccatacagcctgaatacggcagtactgccggcggagagatttccgaagctggatttctttgactttaataatcgttcattatatgaagtccttggttccttctttcatacggaaatgtacagggtacgtcagacgttggaagcagttacggcagataaagagatcgcacagatgctggaacggaaagaaagccagccgctgttgaagattaaggcggtatcatacagtctggaagagaaccgggagattccggtggagtattatgaggcgtatatccttacagagatacagaattattatgtggagaaatttacggtataaggagtgggacattgacgttccactctttttgatataaactatagcctatatgtgtatagtaaaatatagacgttatattatagttgaaaagtaaggagagtacatacaaatgaagagtttttacgagtggtacagaaagcacatcaccggtgcgattttcgtcggactgatcctcggaatcctgaccggactgtttttggcgggacggtttaacgtggttctgactgcaacaagtgtactgggaagtatctatatgagtgcattgaatatgatgatcttcccactggtattttgttcgatcgtaatgggtattgcgagcatcggaagtgccaagacgacaggtaagatcacaggagcggcaatgctgttcttcctgtgcacaacagcaatcgcaagttttgttggactgatcattccgagactgatctgtcttggaaaaggcgttagctttaagatggctacatctgatattcaggcaaccaagatggacagcattcttgatacgattaagggactgatcccgtctaacccggtatccgcatttgcagaaggtaatatgctgcaggtgctggtatttgcgctgatcatgggattcacactgatcgcgattggagaaaaaggtgagccattattaaaggtcatcgactcctgcaatgaagcatgtctgaagatcatcagtacggtgatgtatttcacaccgatcggagtcttctgtacgatcgttccggttgtagaggcgaatggtacaaagacgatcgtatcactggctacgcagctgattatcttatatgtcgcattctttggatttgcatttatcgtatatggcggcacagtgagcattctcggcaagacaagtccggtgaagttcttcaaggcgatcatgccggcggcactgaatgcatttggtacatgctcaagttcagctaccattccgctgagtaaaagctgtgtcgaagataaacttggagttccgaaccagatctcaagtatcacgatcccgcttggagcaacggttaacatggatgctgtatcgatcctgatgtcctttatgatcatgttctttgcaaatgcatgcggcgtgcatgtcagcatttctatgatgatcatcatccttctggcgaacgtccttctgtcagtcggaacaccgggaatcccgggaggtgcaatcgcatcattcgcggcacttgctacaatggccggacttcctgcaggagttatgggtgtctatattagtatcaatactctgtgcgatatgggagcaacctgtgttaatgttatcggtgatatggcaggatgtgtcgtgctgaaagagaagattgagattgaaaaatagaaccagaattccagagagtaaagaaatgtcacaaatgcaaatttcagaaaaacaaaatatattaaccagaacatgggtagtcgcagctctggcgtgtgtctgctgcatcttatggggcagtgcaattcccgtgatcaagacaggctaccagattcttgccgttgattcagcggacaccgcaagccagattgtttttgccggtatccggttcgcactggcgggaattcttgtattactgttcgcatccatccgggaaaaaagagttgtccttccggacggaaagatattcaagtatgctatcccggtttgctttgctcagaccttcgtccagtactttttcttttacatcggagtggcacatacatccggtgtaaaaggcgggatcatcacaggcctaggaaattttattgcaattttaatggcatgtctgttagtaagaaatgaaaagatgacaggcagaaaacttgctggctgcatcctcggatttgcgggagtcgtgatcatcaacatggcaggcggctctatggacatgggattcaggctgacaggagaaggcttcgtgctgatcgcgcagctttcttatggagcgtcaaccgtactgatcaatattttctccaaaaaagtatcaccggttattttaagcggttgtcagttcttcatgggaggtgtgttgctgttcatagtcggaatcctgatgggcggacacttggatcatatgtcgattgcaggagtagtattgattctctacctggcaatggtatcggctgtggcgtatacactctggtcggttctgctggcgcataacgaagtatcgaaagtggcgattttcggatttgtcaatccactttgcagcgtggtgttatcggcgttggttcttggagaggtcagccaggcatttaatgcaagaagtctgattgcattgattttggtttgtgtgggaatttatattgtgaattgtaaaagtaaaaaataaaagaagcggaaaaagttgtgaatgtaaactttttccgcttcttattttataatttcccttccggaatcttactaataattgtcttataaattttgattaaaaatgccgtagacacaataaatgatatcacttccgcaatcgggaaagcccaccacactatatgtaagccaccaatcttagacaagatataagctgacgggatcagcacaaccagctgacgcatgatggatacgatcatactgaatactgctttgccaagtgcctggaatacggtaccggcaatgatgcagaaccatgcgatcagataatggataccgatgatacgaagtgccggaacaccgattttcagcatggcgtcagacgcattgaacattccaagtaatacctgtgggataccttcaaagcagaggaatccaatgaaagtaaggcagaatgcagtcgtcagactgatccggatcgtcttgatcatacgatttctctgctgtgcaccatagttgtaagcaatgatcggcgtgataccattgttcagaccgaataccggcatgaagaagaaactctgaagcttgaagtatacaccgaatacagcagttgcagttgaagaaaattcaatcagaatgcggttcatcgaataagtcatgatcgatccgatagactgcataataatagatggaatacctactgcataaatgtgtccgatcagacggatatccggtcggaagcctttgaaacttaatgatacgtcatggttatatttgtgattacaggttccggcaacgattccggcaacacattgtccgataacggtcgcaacggcggctccggtaacacccatcttcgggaatcccagaagaccgaagatcatgatcgggtccaggataatgtttgtaatcgcaccacataactgagaagtcatactgaagatagttcttccggtagaagtcagtaaccgttcaaagaagatctgtgtgaacagaccaaaggaaaagatcataaccgtactcaggtaatcaattccaagttccatgatctcgacatctgcgtttccaatctgacttgcatagaaaggtcttacgatcgtaaagccgaggattaaaaatacaatgtaactgatggcatagataaatgccgtattatcagcaattttattcgcctttttaaagttatgttctcccagtgattttgacaggagggcattcataccgacgccggtaccggtagctaccgcgatcagaagtgtctgaagcgggaaggctaacgatacagcagtcagtgcattttctgataattttgctacgaagatactgtcaacgatgttataaagcgcctgtaccagcatagaaaccatcattggcagtgacatattgaatactaattttccgacgggcattgttcccatcttattttctgctgcaggagcagatccacgttcactcatagttctcattcctccacagagacgcctgggaatcaggacgtctattcatatattttttcactctttttcattaggtacaatgatatatgatagcatgaatgtaggaatgattcaataaataatgtaaaattgtttcatatcaaactttaatgagtagttagtgttctacatatggaaatattctttcacctgatccaggatgatctgcatcagtctggtacgtgcttctacgcttgcccaagcaatatgcggcgtaatgaaaagccggcggctgtcctggatcttgataagcggatttttctcactcattggttcggcagataagacatccagacctgcggcagcaatttcgccatttacaagtgcgtcgtacagatcctgttcaacaacgatcggaccacggccgagattcaggaagatacaggtttctttcatctttgcaaatgcgcatttatccagaagattttcggtgtgttcattcagtggtgcatggacagagataatatccgaagtggtaagcaaggtatcgaaatcaacctgcgtatatccatcctgtgcagggcgtccggatgctgaataatagatgacatttgcaccaaatgcccgggcaatttgggcaacgcggcgtccgatcgcgccaagtccgatgattccccacgtcttgccattgatttctgaaaaatgttctgcaaagtgagtaaaagaagtatcgttaatataatttccatcttttacataatcatcgtaatagcgcagcttttcaagcagatagaaaagcatggcaaatgtatgctgagtaactgtttctgtggaataaccggcaacgtttctccaggcaattttgtgggaatccagatagtctttatccagattgttggttccggttgcagtaacacagaccagtttcagattctttgctgttccgaccgtattttcattgatcggaactttgttaatgataagaacatctgcgtctttcacgcgttccggagcttcttccggagtggtaaagttatatttggtaacttcaccaagtgaatcaaatccggacaggtcaatatcgtccccgattgttttggcatctaaaaatacaattttcataaaatgtccgtcctttcataattacaaatattaacgcatgcagatatataccatataagcggcatataataccagcatgataattccttctttacggttgatttccttcgaagtccatgcaaagacgagagtgattgcactgattatgataaggaaagcaatgtcgattatattttccagagcgaatcccaccggactgattgctgccgcgacaccgagtacaaaaaggatattgaagatattagagccgatgacattaccaagtgccatatcgacttcgtcctttctggaggcaacgatggaggtgacaagctccggaagactggttcccatggcaatgatcgtaagtccaatcagtgtctggctaagtcccagactggatgcaattgaggatgccccgtcaacgacgaaatcaccgccatatttgatcgcaatcataccgcccaatatgaaaatgagacatttccataacggaaggaggttgatatgggaggcaacctcctcgatttctttttcggaaagtgagcttctcactttttgtgcagaagaagaatccgcagaagttatattgtgacgtgctcttttggcagagcggatcatccagagcagatatccggcaaatataataaggaagataattccgtctatccgtccgagtgtcatgccaagatatccaagcaaaagcaaaagtcccgcacagaagatagataacgggaattctttctgtaaagtacttttctgtacagcaagcgggacgaataaagaacagacaccgcagactactaacaggttaaaaatgttggatccgacagcattactgatagcgagggaattattgccggtgagggaggcagtcacgctgacggcgcattctggaagactggttcccatggctacgatggtcatcccgatgatcatagaaggaatccggagacgttttgctacagcagaacttccctctacaaaaaaatctgcacccttgatcagcaggacaaatccgataattaatatagtgaatgatttgaataataacatatgaatctccttttcttatatagacaataatatagaggaaataagtgccagtgtcaatgtatgcaatttattcttcccaaactcgcagaattactgtatatttatagagaaaaataaaagtatgttaagtatgatcattgataacatcagctcatttatgtacagtaaactgttagttatcatattgatcggagctggtgtgtattttacaatccggacgagtttcccgcaggtgcgtctgtttcacagtgcctgtaaagcagtaatgaagaaaccggatgatgaagatgcagtctcttcttttcaggcgcttatggtctccactgcatcaagagttggtacgggaaatattgtaggtgtatcttccgcaatctgtatcggtgtttattgacacattattattgtgtacggcaaccgcaatgatgtgtatgtcatccggagttgccccgtcagaagcacttcagggagcaccatgggtacaggccgcacttcaggaatcgcttggaacattcgggtctgtattcatcaccgtgtctatggtattatttgcatttacgacactgcttggtaactgcttttactgtgacaacctgttgacattctgtctaatacgacaatgaaggcattgaaagattatgaaagacagcttaaaatgggaatgaatccggtgttcaagagtaaggatatcggaatgaaagagaaacttgactgctggaagtagcgaaagtagtaagaaatataaggtggtgagtgatatgtattatgtaccggacgggacaaaggaatgcggatattatgaatgcaggaaatgcggaaaccgtttcctgtcattacaaacgatgaagcatattccatgcccggactgcgaacaggagatagattacgagatcggaccggacgagtcattagaagatgtgctggatacagcggagctccttcagaagattgaaggcgaggaagaggttgaaaagatggatgcgcttttgagtcttgcaattactggtggggattgtaattggatttgatttgcgatttaattcttaaaaattaatctatgcagattctttctgtgctttaaagtaagctttgacaagtccgatggttctttctaccagtgcggacagtaactggttggcagatccgaacagtggccagatattggcatatccgatacgtgcaacggcgtccagactggtaagtgccagtgcagcaacggtacatacaagacctggtactgtctctttccatcctcaaattttttcgctggtgtctctgcctttggatcaattccccatttattagcaagccagcgtccgtaaagtacatatgcagcactgagaagtacagctgcaattaagacgattacaagtgtattcataacatacgccttcatgataaatattaaaaatgtataagcattctaaaatatgaataactttagatagtgttttactgcgaaaaatggcatatgtcaatgcattttgaggaatttcgcaggttttaaatataataacagagtacactctgtttttttatgcgaaatcacaagaagaaatgagcttatattctacgggtagcggtatcctggaaacagaaatagtccggatagcagacggttcatgtattaaataatgcttttctttaaaatatccacggtatgtgatccggcgcccacaagctccggccgttcacacaccgaaagatgataccggataaaagtctcgaatgtctcctcatccatcgcattcagcaccggacgcatataatccgaaggtccgtcggcagagatgaccttgattcgttccagaccggcagctttattataagcatccatatcttccaggcggacataatcgtaaaggtcttcaggtttgggttgtacacggaagttgtcgtcaatctttccgttctcgatacattctaagatatgattctgtttgaatccataggtcagcacgctgtactcattcatgcaataagcaacaagaattacaccatcatctttcaatacccgtctggcttcggtcagtgctttgactttatcttccatagaatatagatgatacattggaccaaagaccagaactaaatcaaattccttattcggaaagcgggaaagtttcattgcatttccctgataggcttttacagaactgtttttcttttttaagatcccaagattatatttaaccagttcaacagcggtaacatcgtaaccttcttcggcaagggctacactgtaacggccggtaccggcacctacatccagaatttttgctgatttatcttccggaagatattcatgtatatatttcatagaagtggtaaattctacttgtccatgtcggcttccaagacgtttttcttcgttaaatttattataatatttctcaagttcagtcatcatagtgaaagattctccttatataaaataaatatctgctcatactttatccactttaacataaagtccgggcttatgtgcataaaatatttatggaattgagaaaatttatttcattctgtataatgagataacaataagatccagatgatagtaaaaaagaggaaatgatcatgaacaatacagaaagcataaatgaaaaaataatacagaatatgatagaaattacggattttgacgctccggaactagatgtatatgcaagacttacagaagcacagctcttgaacaaggatcatccggaggatggactgtttattgcagaaagtccgaaagttattagccgggcattggatggaggatatgagcctgtgtctgttctggtggaaaaaaagcaggttttggaagatgcggaaacgatagctgtacttggaaaatgtggcaatgtaccggtatatacggcagaatttgaagtacttacgaaacttacgggatttaaactgaccaggggaatgctatgtgcgatgaaaagaaggaggttgcctggcctgcaggaaatctgtaatggatgtgacagaatagcagtattggagaatgtaatgaatcctacaaatgtaggagcgattttccgctctgcggcagcacttcacatggacgcggtgattctgacagggggatgcagtaatccactttacaggcgggcaagccgtgtaagtatggggacagtattccagattccgtggacatttgtggataactctgtaatctggccggaagaaggaatgaagatattgcgtgaattgggatttaagacggcggcgatggctttgaaagaagattctgcaagcattgatgatccggaacttatgaaagaagataagctggcagtgatactgggaacagaaggagacggactggcgccggagacaattgcagactgcgattatacggtaatgattccaatgtcgcatggtgtagattccctgaatgtcgcggccgccagtgcagtagcattctggcagttgggaaagagataaataggacagataaaacattagatatgctgcagttgaagaatcgcttataaaaagaatgtaaaataaacagacttgtgttatgataaaaagcaaaaagacagaaagtataggaggaatcatagaatgtatattacatgcctagatgttgaaggagtattagtaccggaaatatggatcgcatttgccgaggaaagtggaatcccggaattaaaaagaacgacaagagatgaaccggattacaataaactgatgagatggagactggacattttaaagcaacacggacttggaatcaaagagattcaggagacgatcgccaagattgacccgcttccgggagcaaaagaattcttagacgaactgcgctcatttagtcaggtaatcctgatcagtgatacatttacagagttcgcacagcctttgatggaaaagcttggaagaccgacactgttctgcaacagccttgagattgcagataacggtgagatcacagactttaagatgcgtgtggaaaattccaaactcagcaccgtaaaagcactgcagtccattggatttgacacgatcgcaagcggtgattcatacaatgatctgggcatgatccaggcaggaaaagcaggattcttattccgaacgactgagaaaattaaggaagattatccggagattccggcttatgagacgtatgaggaactgctgggagcaatcaaatcggtaatttctatttaatgcattaagcggttgatacccggccggaagaaaaggaagagagtcccgctgcgtgctgattcaatcatgtttcagagcgacagacgggactcgaacccgcgacctccaccttggcaaggtggcgtactaccaactgtactactatcgcatagcaactacttgcaacgtcttttcagagcgacagacgggactcgaacccgcgacctccaccttggcaaggtggcgtactaccaactgtactactatcgcaatggagctgactgatactaatcggtcgagggcatgaccaagcaaggtgataggtaggatgaaagaaatatttcttgtatgtagttttgaaagtatatgaaagataagaaacaatcaacgatatgttggttgttttttgttatataaatataatttatgaattaaaataatattaagatttataattttctttttttagtcaagtagtaagaagcaatcaacaatagccacatgttgattgcttctttagataccaaagtatacaagaaaagttgccgatggcaagttttggatatagcagacttagttacagcaaggcttacgatcgaattcaggattgaatgcgtagaagttcttactgtcaagtttatcttgaacaattctcagactttcaccgaaacgctgataatgaacaatttcacgttcacggaggaagcggattggatcgcagacttcaggatcttttaccagacgcagaatattatcatacgtagtgcgggctttttgttctgcagccatatcttcatgcagatctgtaatcggatcacctttggactggaatgttgtagcactccaaggagttccgctggcagcctgaggccagagtgcgagtgtgtggtctacataatatttgtcgaagccggatttttcaatttgttctggtgtaagattacgggtaagctgatgcacaatggcacagatgatttcaaggtgagccagttcttcggtgcctatatccgtaagaattccggtaacttccttataaggcatagtatatctctgggccagatatctcatagatgcagcgagttctccatctggtccaccgaattgagtaaggataatctgggcaattttcgggttagtctgagtaatcttaacaggatattgtaatcgtttctcataattccacataaattagcatcccccttcctgccatggccacggatcattaatccatttccaataatccatctgtgtagttgccgtatcaagcgtgagaggaccgtaatatttggcatattcttttaaggcctgcacgcgttgctttttaaattcatcaaaaaaatccagtgcttcggtacaatttgggtgagtgtcgagaaataattttacatcgtctacagcaaaactgacaatatttatccattccaggagctcttttttacaaggtcggttttcgttcatctggccgcaccacctttccaacagaatgggagatttaattctgcaaaaatagttccacatcggaatcctttttcgacttcataaagagaacgccattcctgccacggaacataggccatagcaattgggagcccgcttaatttgtcgtgttcatgaatattgcagcacgatctggaaggagtggatggcgatacagaagccggcattgttcggctcccgcctacatgacatccgttagaattgttctggcgcatataatcaggtgtattataacgataatttggcatttaaaatactcctttcgttaatgttatgcaataatattgtatgaaaattaatgaaagttgtgaatcagacagttgtttttaagaacgtatctgagtataatagatacgattggagagtagaaatatggtaaaagaagttaataaagagcacaaaaatgtgaaaatgacaaggaaaaagaaaaggagtggaattgtttactttgattatagtctgctggcaatactgatttgtcttgtatgttttggattggttatgctatatagtacaagttcttatagcgcaatgatgaaacagaatggggacagtctgttttattttaaaagacaattattattttgcattgttggttttataggaatgtggctggtaagtaagattgactaccattggtacataaataaatcgaagttattttatttcttttctatttttatgatgtttttagtaaagacaccactgggaaaggaagtaaatggcgcaaaaaggtggatcaaacttccatttggacagcagcttcaacctgcagaaataaccaaaattgctgttatattatttattccggcactgatctgtacgatgggtaaggagattaaaccctggaagggagtaataagagtactggcatggggaggattttcggcggcagttgtttatctgatcacagacaatttgagtacagcgattattgtgatgggaataacctgtatcacgatatttgtagtacatccgaagacgaagatatttgtcggcatagcaggtgtgggaattgttcttgcgattgccggtgcaagaattctgggaacaatgatggaaacgagcggaagcttccgtctgcgccgtattcttgtatggctgaatccggaaaaatatgcgtcggaaggtggatatcagatcatgcaggcattgtatgcgataggatctggtggcttttttggtaaaggtctaggaaacagtgcacagaaaatgatcattccggaagtacagaatgatatgatcctttctattatatgtgaggaactgggagtgtttggtgcaattatggttctgatattgttcggtatgttattgtacagacttttgtttattgcacagaatgcgccggatctttacggatcattgatcgtaaccggaatatttgcgcatattgcattgcaggtaatattaaatgtaatggtagtaattaactgtatcccgacaacgggaattacacttccgtttatcagttacggaggaacttcggtgttgtttttgatggctgagatgggactggcactgggggtttcagcaaggataaaaattgcggaataaaagactttcatttcttgtgtaaatatgctatgatgaataatgtagtatttaaaactacttctaatagaaataagcgaccgaaaaagagtttttgtatcaattatataaaacactcatgtaaggtcacattaggaggaagaacatgagttacaaagttatcatagatagttgtggagaattaacagaagaaatgaagaagtcgggccattttgagacggcgtctctgcagatcgatgtagatggacatcatattgttgatgatgagagttttgaccaggcggactttttaagaagagtaaaagcatcgggtgaatgtccgaaatcatcatgtccgtcaccggaaagatatatggaagaatatcattgcgatgcggaacatgtatatgcagtgacattgtcggcagaacttagtggatcatataatagtgctgttttaggaaagaatctgtatgaagaagagtatggagagaaagacatttacgtgtttaattcaagatcagcatccgtaggtgagacattgatcggtctgaagatagcagaatgtgaagaaaagggcatgagttttcaggaagtgatcgaaacagttgaatcttatattgaagagcaacacacatattttgtactggaaacacttgatatacttaagaaaaatggaagattgaaaggactaaaggctgttgtcgcaacggcacttaatattaaaccggttatgggttcaactccggaaggcagtatacagcagctttcgcaggcaagaggaataaaaaagggactggctaagatggtggatgaagtagcagccaatatgaagaatacacaggaaaagattttagcgatttcacattgcaattgtgaggaaagagcaaaggctgtaagagatatgcttcttgaacgtgcatcgtttaaagatgttattattctggatacggcaggaatcagtagtatgtatgcggctgatggcggagtgattgtagttgtataattttatcagatatgatagaatgaatacattgattggaaaaggagcaaaaaactatgagccaggctaaagtagacagatataaagatgaaaagaaaaaccgtaaaaagaacatgaagaaagaaaaggttcagaacattatcagaagatgtgcagtatgtgtaatagcagttgctttgatcggatgtgcaggctattctgtacataatatatatgagtcgaaaaagccgacggaaaaggtaacggttgattattcggcaatgacaactttgagccagtcattagctggaaatagtgacacaacagctgaatagtataaaataaacctagaaagaataagtgaacagaagcattttctgttcactatttttttgccttaaaattatcttaatttcttaaaaagggttgaaaacagcaaaaaagtagtttacaatgggttcaagtggtagaaagtggtgaaaagtggaacaaagtggtagaaaagtggatgatgcaggatgaaagctaaaaacgtagctctgaaagcaaagtccggtgttataccattggaaaaaggagagtcctatgttgaaaggagagtacagtcataatattgatgccaaagggcgtctgatcattccggctaagtttcgtgacgatttaggggagcatttcgtcattacgaagggaatggagaattgtctgtatgtatacccggaagcagaatggaccgcttttgaagaaaaacttaacgcattaccaaccaccactgataaaaaagcacgtgcgtttgcgtatttctttcagggaagcgcagcggacggtgaccttgataagcaaggcagaactctaatcccttctgtacttcgtacatttgcacatctggataaggaagttgtattcataggcatggggaagcgtgctgagatctgggataaggcaagatgggatgaaaagaatgctgaagtggaacttaacattgaagatattgcatctgatatggaagaaagcggattcagtatctagagggagaagatatgggattcgaacacaaatcagtattactgaatgagacaattgaaggattaaacatcaagccggacggcatctatgtagatggaacgcttggtggaggcggacatgcatatgaagtatgcagacgccttggtgaaaaagggagtattataggaatagaccaggatgaggcggcaatagaagctgccagtgtccgattaaaagacttcggggagaaagtcacaataatccgaagcaattattgtgatatgaagtcaaagcttcatgaactgggaattgacaaggtcgatggaattgttcttgatctgggcgtatcatcttatcagttagatacggcagaacgaggattttcttatcgtgaagatgcacctctggatatgagaatggacagacgtcagaagatgacagccagagacatcgtcaatgactactctgagatggatttataccgtgtgatcagggactacggggaggataagtttgcaaagaacattgccaaacatatcgtagcagcacgtggtataaatcctatcgagactacggggcagttgacagagattatcagagcctcgataccaatgaaatatcagaaaaagtctgggcatcctgcaaaaaggacgttccaggctattcgaattgaattaaacagggaattggacgtattaaaaaattctctagatgacatgattgaaatattgaaccctggtggaaggttgtgtattatcacattccattcgctggaagaccggattgtaaagagtgcatttaagaaaaatgaaaatccatgtacgtgccctccggattttcctgtgtgcgtatgtggaaaagtttccaaagggtgtgttgttaccagaaagccgattcttccaagtgaggaagaattagaatataacagccgttctaaaagtgcaaagctcagaatatttgagcgccgttagagataggacaggatatatgaacaattagaaaggagtggcgtaaatggcagcaagaaaaagttatgcaagcgatagacgccagtccggcggatatagttctgcgcgttcgaaagcgggacaggcttatatgtatggcaatgtagttgcaaaaccggaatatgaaccaaaaaagaaccgatcatccgtaaaaagaagaaaaaaagtaagcagacaggtacagaaaaatagaaatcgtgcacttcatatgaatgcagcgtacgtagtgttccttgcaattgcagcaacaattgtgttgctattgtgcgttaattatgtacgattacagtctgaagtaacaaagcattcaaagaatgtaactgcattgcaggaagagcttgcagatctgaaagaggagaatacgacaaagtataatgcggtcgtggattccgtaaatctggatgtgatccgagaaaaagcaattaatcagttgggaatgacatatgccacaccagatcagattgtggaatatgataatccggcgtctgattatgtgaaacagtatgagaatatcccggaaaatggtgtgcttgctcagtcagacaagaataagaaataggtgggattatggcaagaaagaagacaaatttctttaagaaaaaaatttcaggccttatgcagaaaaagctagtaatgctctttggagcgattatactagcttttgttttcttgatagggtggattacgtatattaatgcttcgaagggcgaaaaatatacgaaggttgtattagatcagcagcagtataataatcgtacgattccatttaagcgtggagatatcgtagacagaaatggcacaaaacttgcaacgagcgaaagagtatataatgtagtagtagatgccaagacaattaccagtaataaaaagtatatcaatccgacgataaaagccttatcaaaatgttttgatttaaagaaaaaagatgtaagaaagcagatcaaaaagaatccgaacagcagatatcttgtactgaaaaagggagtaaattacgaagcatatcagaagtttgagaagattacatctgacactgataaaaatcctaacgtacagggagtctggatggaagaagattatacgagaaaatatccatataagacactggcaagtgacgtgatcggatttacaacaaatggaaatgtaggaagcaacggaatagaggcttcttataattcgattttaaatggtacggatggaagagagtatggatatctggatgaagattcgggatatgaaagaacggtaaaagaaccagataatggaagtacggttgtctcaacgatcgaccttcaggttcagagtattgtagaacaacnnnnnnnnnnnnnnnnnnnnnnnnnnnnnnnnnnnnnnnnnnnnnnnnnnnnnnnnnnnnnnnnnnnnnnnnnnnnnnnnnnnnnnnnnnnnnnnnnnnnnnnnnnnnnnnnnnnnnnnnnnnnnnnnnnnnnnnnnnnnnnnnnnnnnnntatgaatccccagaatggtgagatactggcggaagcatcatatccgaattacgatctgaacaatccgagagatctgacaaaatattatacagaagaacagctgaagaaaatgacggatcaggaaaaactggatacactgaatgatctctggaataactattgtgtcagcaatacatatgagccgggttcgacattcaaaccatttacaatttccgcgggacttgagacgggggttcttacaggaaatgaaaattatgtctgtggcggtgtcatgcatgtcggagatcatgatattcattgcagcaaccgttccggacatggaccggagactttgaagcaggctctggaaaattcatgtaatgtggcgttaatgcagattggtgcaagtataggaaccgaggaattctgcagatatcagaggctgttcggatttggcgaatatacaggaatcgatctgccaggagaaggagaaaccagcgggctgttatatacaccggcgacgatggatccggccagtcttgcgacgaacgcatttggtcagaactttaatgtcacgatgactcagatggcggcgtcattctcttctctgatcaatggtggtaactattatgaaccacatgtagtaaaacagattcaggatgataatggaaacgttacagaaaataaggatccagtactggtaaagaagacgatttcaaaagaaacaagtgatattatcaaagattatatgctgggtgtagtagaagaaggaaccggagcaagtgccgcagtagaaggatatgcagttggcggtaagaccggtacggccgaaaaacttcctcgtggtaatggaaaatacctggtttcatttatcggatatgcaccacaggagaatccgcaggttatggtgtatgtagttattgacgagccgaattcggctgttcaggctaacagtgggtatgcaacacagcttgcgtcacagatcatgactgatattttcccgtatcttggtatagagaagaaaacagatagtgcttccaatacagatacacagacgactcagacagcacaacagtaagttatatgttcataaccccataaaagttttcatatattattatgaaaatttttatggggatttttgttatgaaaaataaaacgtttcataaaaagaaaattctggttgtttttctggcggcgtttatcctgattctctatctgatcggaagactggtatatctgatggtatttgatgcagagtactatcagcagaaagcagaagatctgcatgaaagggaacgggatattaaggcagcaagaggtgagatcattgacagaaatggaaccgtacttgcaaccaatcggacggtatgtacgatttctgtgatccacagccagattgaaaatcctgaaaaagtaatcgaaaaattgtcagagtttctggaaatggatgcagaccaggttagaaaaaaagtagaaaagatttcatcgatagaaaggctccggtccaatgtagataaaagaacaggagacaaaatcagaaatcttggcctggccggtgtgaaggtagacgaggactttaaacgttattatccgtataatgagctggcatctaaggtgctgggatttacaggaggggataatcagggaattgtaggactggaagtaaaatatgaaaagtacctgaaggggataaacggaaagattctgacaacaacggatgccagagggattgaactggatggtgtggcagaggacagactggaaccggaagcaggaaatacgttgaggatcagcctggattatacgatgcagaagtatgcactacagatggctgaaaaagtgagaacggagaagcaggctgacaaagtgggaattatacttatgaatccacagaacggagaaatctatgcaatggtgaacgttccggaatttgatctgaatcagccgtttatgctgaataatgaagagacaggtgaaaacctgacggatgaacagagacaggatgcattaaatcagatgtggagaaatggctgtattaatgatacctatgaaccgggaagtacatttaaaattattacggcatcggcaggactggaagaaggagcagtgcatcttacagatcagtttagctgtccggggtataaagttgtggaagacaggcggatccgctgccataaagttgggggacatggggcggaaaattttgtacaggggatacaaaattcatgtaatccggtatttattgaagtaggattaaggataggagtggatcgtttttttgattatttcagacagtttgggctgatggacctgaccggggtagatataccgggagaagcaggaacgattatgcataaaaaagaaaatgtagggcaggttgaacttgcgacgatcagtttcggacagtcatttcagattacaccgatccagcttgcaacgacggtgagtgcactggttaatggaggaagaagggtgactccgcattttggaatggaagtattgagtgaggaaggaaaaaaagtgaaaacatttcgatataatgcaaaaaagcatattgtgtctgaaaaaacatcacagacaatgcgggaacttctggagagtgtagtggcagaagggtccggaaagaatgcatatgtagaaggatacaggatcgggggaaagacggcaacttcccagacacttccgagaagtgccaacaaatatatatcatcttttgtaggatttgcaccggcagatgatccgcagatccttggaatgtgtgtaatatataatccacagggagtctattacggaggaaccattgcggcaccggtgatcggaaaaatttttgaaaatatattgccgtatcttggcattgaaaaacagtaggaaatgcagtatactaggtaaagttagagattaactgaataacaaaagaattaaagaggtggattatggattataaagtgtttattccagtattgatttcatttgtattaagtgtgattcttggtcctcttgtaataccagtacttagaagactgaagatggaccagacggagagagaggacggtgtacagtctcatcttaagaagacgggaactccgacaatgggaggagtaatgatcctgctggctgttgtgattacttcagttatttatattggtcgttatccaaagattattccgattctgtttctgacacttggttttggactgatcggattcctggatgattatctgaaagttgtgatgaaacgttctgacggcttatatccaaagcagaagatggctcttcaaatcgtagtgactgcgatctttgcattttatatggttaaatttgcaggagtttcgcttacgatgctgattccatttacaggtggaaaatatctggatatcggatgggttgcgattccattgatgttctttgttgtaattggaactgttaacggtgtaaactttacagatggtctggatggtctggcatcaagtgttaccgtacttgtagcaacatttttcacggtggttgcgatcggtaccaaaagtggaattgagccaattacctgtgcggttgtaggagcacttcttgggttcctgctgtttaatgtatatccagccagtgtatttatgggagatacaggttcgctggcacttggaggatttgttgcttcagcggcatacatgcttcagatgccaatctttattatcattgttggatttatctatctgatagaagtattatcggttatgatccaggtaacatattttaaaaagaccggcggtaagagaatattcaaaatggcgccgatacatcatcattttgagctgtgcggatggtcagagacgagagttgttgcagtattttctattattacagcaatcttatgtctgatcgctctgatggctatgtaggaggatatcatggaagtaaaaggtaagaaagtacttgtgtttggtcttggaatcagtggaatcggagcaggacagattcttgaaagacatggtgcagaagtaataatgtacgatggaaaccagaaactgacagaggaaaagataaaaaaacaacttggagaagacagcagtgccaagatcgtgatcggagattttccggaagaagttctggaaaagcttgatatgacagtattaagtccgggtgtgccgacggatcttcctgtgattgaaaaaatgcgtgagcagggaattacggtaattggagaagtcgagcttgcatatcagttcggtaaaggtgatgtccttgcaattaccggtacaaatggtaaaacaaccacaacgacacttctgggagagattatgaagaactatcaggaagatgtcttcgttgtgggaaatattggaacaccatatacaacagcagttgagaagatgacagacaatacaatcacagttgccgagatgagcagtttccagctggagagcattgtggatttcagacctagagtaagtgcaatcctgaatttcacaccggatcatctgaatcgccatcatacgatggaagcatatgtcaatgcaaagaaaaatattgcaaagaatcagacagaagatgattattgcattttaaattatgaggacaggcttacaagagaatttggagaagaaatcaaagcaaatgttctatatttcagcagtcagcgtaaactagaagagggaatctatctcgaggaaggcaatattatttacaattatggcagagtaaaagaaacaatctgtcatgtggatgaattgcagatcctgggaacgcataatcatgagaatgttatggcagcatgtgcaatggcagcagtttatggagtgccggtagatgtgatacgtgaaagcgtcaaggcatttaaaggagtagagcatcgtattgaatatgtaacagagaaaaaaggtgttacatattacaatgattcaaagggaacaaatccggatgcggcgatcaaggcaattcaggcaatgaagcgcccgacagtattgatcggtggaggatatgataaaggatctgagtatacagaatggattaacagttttgacggtaaagtaaaaaaactgatccttcttggggatacaaaagagaagatagcagcagatgcagaaaaatgtggatttaaagactatatgtttgtagattcatttgaggaagcagttcttactgcagcaaaaattgcagagtcaggagaggcagttctgctttcacctgcatgtgcaagctgggatatgttcccgagttatgaagtacgtggagagaagttcaaagaaattgtaaattccttataaggagaggatggcttggaacgatcgaaacaaagagcgtatgattatgctctggtcatcgtactggggattattattgtaacagggcttgtgattctttacagcacaagtgcatataatgggaaactcaaatttcaggattcgttttactatctgaaaaaacagatatttgcaacgcttcttggaatagcaggtatgtggatcatcgccagagtggattatcatgtctggaaaaaatggtcagtaccggggtatctggtatctgttctgctgggtattgcggttcttctgattggtgatgaatataacggatccaaaagatggttatctttgggtccgttttcttttcaaccgtcggaatttgcaaaagttgcggttatattgtttttgacgtacgtgattatgcgaaatgtaaaaagcatggggaaatttacaacggtctgtaaaatagttgtaagtgttctgccggttgtaggactggtaggggcaagtaatctaagtacagcaatcattattcttggaatagccgtagtattggtatttgttgcaagcccaaaatatggtcagtttgcatggatgatatttcttggctgtgcatttatgggaatatttcttgcaatggaaagttatcgtctggaacgtctgcagatatggcggcatccggaaaattatgaaaagggttatcagacattgcaaggtctgtatgcaattggttcgggaggattgtttggaaaaggatttggaagcagtattcagaaattgggatttgtgccggaagcccagaatgatatgattttttctatcatatgtgaggaattaggtctggtaggcgcatcttttgtattattattatttttaatcttaatctggcgtttttttgtgatagcttcacatgcaccggatctggagggtgcattgattgcatccggggcaatggcacatatgatgatacaggtaatcctgaacattgcggtggtgacgaatacgatcccgaatacaggaataacacttccgtttatcagttatggaggaacttcggttatgttcctgctttttgaaatggggcttgtgctgaatgtgtcatctttggtaaaataatatacatgtggatgagacacaagaatgaaaggaagtatgaatgatatatgggaaaccagaatcagaaaagagaaggtacaaaaaagaaaagaaaagataaaaagaaaaaacatcatgcatatgccttgattgttttgatattggcggctgccattataatccttggaactgttttgctattctatattcaggaagtggaagtaagcggtaatgaatactgtgacagtcaggaaatagttgaatgtgtacagaatgataaactgtcgaagaattccctgtatgtactggcaaagtattcgttgggccaaggaaagaagccggagtgcctggatacattgaaagtcagtatgaaaaatccatggacactaaaaattaccgtaaaagaaaagacaagggtaggctgtgtgaaatcgggaaaaaaatacagttattttgatcaaactgagcttgtagtaaatgaaactgaagtgaaagacagcaagataccggttgtcagtggattaaaaataaagaaaaataaactgtacagccagattaaaacgacaaatcagacgaaattttccgaaatagtagaagcatgtggggaaagccagaggtatggaatatacccggaaaagatatatgtaaaggatcagcagatctatatggattttggaaacgtaagagcatgccttggaaatcaagtatccgcagaacagatcgctcagatcagaccaatcttaaaaaagctgggagataaaacgggaattttgcatttggagtcgtattctgagaataacactacgattacatttgaaatggaagatatttcacaagaaaattaagaaaattagagaaattctattgatattttatacgaaagtctatattatatactatatatagcaaactgagttcatctcacttgctctatcaatgggatgtataatatataataaggataacaaaggaggagaaacccttgctagaaattaaaacaaacgaatcagaagcagcggcaaagattattgttgttggagtaggtggaggcggtaataacgcggtaaaccgaatgattgatgagcagattgccggtgttgaatttatagcggtcaatacagataaacaggcacttcagctgtgtaaagctccgacactgatgcagatcggtgataagattaccaaaggtctgggagccggtgcaagaccggagatcggtgagaaagcagcagaagaaagtgcagaagaaatatcagcagcactgaaaggtgccgacatggtattcgtaacatgcggtatgggcggtggtaccggaacaggtgctacaccagtgattgcacgtattgcaaaagaacagggagcattaaccgtaggtgttgtaacaaaaccgttccgttttgagtctaagacacgtatgaacaatgcccttgcgggaattgaaaaattaaaagaaagtgtggatacgctgatcgtaattccaaatgataaactgctggagattgttgacagacgcacaacaatgccggaagctttaaagaaagctgacgaagtattacagcagggtattcagggaatcacagacctgatcaatgtaccttcactgatcaaccttgacttcgcagatgtacagactgttatgacagataaaggtattgcccatatcggtatcggtcagggacgcggtgatgataaggctctggaggctgtgaaacaggcggttgccagtcctcttctggagacaacgattgcaggagcatcacatgttatcatcaatgtatccggagatatcacacttatggatgcagctgatgcggcagaatatgtacaggaacttgcaggagaagatgcaaatatcatctttggtgctatgtacgatgattccagagcagatgaagcaacaatcactgtaattgctacaggacttcacaatgttggaggaagtgcttcaaagttaaaatcaagactggagaatcagggcagatcttcggctatgccacatggtcagcagggacatgcatccgcatatgaaagaccgacacgtcagaataatacgatgtatacgcagcagcagactgtacgtacacagcaggctgaacgtccggtttcaccaagacttgattttggaacaacaacacagagagaaaatggtggaacaactgcaagaagaccgattggtggaacaactcctacattggatacaccaagaacaccgacaagtaaagtgaaagagcagtcaatcaaaattccggatttctttaaaaaataacaatcacataaagagttatattacttaaaaaagacagaagaactgatgcacatgaatttgaaatgtgcacagttctttctttttttcttcttttctttcttaaatgctcttttgtttacgaaagcagtcgaacgaaaaccggcatatcatacatcatatgacaaaatcctttctataaaatctatataatgatacttgtttgaaacaacaaatctatttctgtgcacggaaagagaaagaaggcctgatgtgtactatgaattatatgtagatgtgttctttttgatgaactttacgatggatacaattcttttggctttactaaagaaggcattggcatgtccggtgagatatggccgcataatagcgggaggcgtactgggagcagtattgacctgtgttgttgtgatatggccgtgtaagacaacttgggcgaaatttatagtatttcatggcgtcattaatgtattgatgctaagaaccggtctgggattaaaatggggccgggaattgttcagaggatgggtaattttatatatagagtcttttcttttagggggagtattacagtttgcgggacagtatctgcggcagggaagtgtattctttgcattggcagtcatcagttattatgtggtgttgggaatctggaagatcattttattgttttcggagaaaggaaatcgttactgtgaagtggtggtgtttttcggagaacgaaattgtagactgagagcccttatagatacaggaaatacattgaaggatacagtgagtaaagatccggtcagtgttatggatcaggcatctgtaaagagattgacagaaggaaagcaaccggaacgattcagatatattccatatcattccatcgggaaaaaagagggagttatgcctgcatttcgcatggataagatacagatcatacggaatggatacaggataaatgtagaacatccattagtggcggtatgtgaagaagaattagggtcagaaaattatcagatgatcataaatccagatatattggcaggaggaaagaaaaatggtgataaaagtagcagttccacatcagtttaaattgaaagtaattccggatttgaagacactcttttttgtggacagaaaagacattcattacataggcggatcggatattctgcctgcacctttagaggcggcggcagaaaagaaagcaatcaaagaccttgggacagaaaaagatgaaaatgcaaggaaaatactgattgaacataatttgcgcctggtggtatatatagcaaagaaatttgacaatacaggagtgggggtagaggatctgatatccataggaacgattggtcttataaaagcaattaatacatttaatcctgataaaaatatcaaacttgcaacctatgcatccagatgtattgaaaatgagatattaatgtatttgcggagaaataataaaacgagaatggaagtatcgatagatgaaccgctgaatgtagactgggatggtaatgagctgttgttatcagatatcctggggacggaagaagatgcgatttataaggatttagagaatgaagcagaaaagaaggtgctcatcagagctattggacgtctgtctggaagagagcagatgatcataagaatgagatttggacttggaacggaggatggagaagaaaagactcagaaagaagtagcggatatgctggggatttcccagtcctatatatccagactggagaaaaagattatgcaaagattgcgtcgggagatggtgaagtattcatgaaaatatgatacaataaaaagaaaaaaggggttggtcatatgagacttagcttttttggagcagcccatgaagtgactggaagctgccatcttcttgaagcgtgtggaaagaatattctgattgactgtggaatggaacaaggaccggatctttatgagaatcaggaacttcctgttacaccgggagaggtagattacattcttctgacacatgcacatatcgatcattcgggaaatattccgttattggttaaaaagggattttccggagagatcattacaacatttgcaacggcagatttgtgcgatatcatgttgcgtgacagtgcccatattcaggaatttgaggcggaatggagaaaccggaaggcaagacgaagtggggaaccggaatacgaaccgatttatacggttgcagatgcagatgcggcgaccaagcttctggtacctgtggattacggtcagaagattacattgtgtgacggaatagaagtcagatttaatgatgtagggcatcttctgggatccgcaagtattgaagtgtgggtaacagaaggagaagtttctaaaaagatcgtattttccggagatgtgggtaacaagaatcaaccgatcatcaaagatccgcagctggtaaaagaagcagattatgtagtgattgaatctacatatggagaccggacacatggagaggatattccggattatgtcggcgaatttacaagaattttacgggaaacattccaaaaaggaggcaatgtagtaatcccatcgtttgcggtaggacgtacgcaggaaatcctgtattttatcagagagataaaagaaaagaatctgcttccggaattcccgggatttgaagtgtatgtagacagtccgctggcaattgaagcgaccaatgtgtttaataaaaatgtcaaaggatgctttgatgaagacgcaatggcgcttgtcaatcagggaattaacccactgttgttccagggactcaagacaacgattaccagtgatgaatccagacagattaattttgatacgaaacctaaagtaatcctgtctgcatccggtatgtgtgaggccggacgtatcaggcatcacttgaaacataatctgtggcggccggaatgtaccatctgttttgttggatatcaggcagtgggaacgcttggaagaaagctgatcgaaggtgcacagagtgtgaaattatttggtgagaacatcacggtcaacgcaaagatagaagtgttaaggggaatcagcggacatgcagatatgaatggactgttagactggctcgcaggatttgaaaaggtaccggaccgtgtgatggttgtacatggtgaggatacagtgacggatcattttgctgcgcttgtagaagagcaatttggctgcccggcatttgcaccgtattccggaggttccgtagatcttgcgacaaatgagatcattaccattggtcagaagattccgaagaaggcagaagaaaagccgaataagattaaaagtgcatctgcatttaaccgtctggtggcagcagccaaacgtctgttaaatgtagtatataagaacgaaggaattgccaataaagatatggcaaaatttgaaacacagatccaaaatctggcagacaaatgggacagataaccgacgtcagaccggatgtcaaggagtaaaagtttttttaatttcataagaatccgcataagcctgtgcgatatggagaatcattttactagaaactgatagagaagattctgacaggaggttcgcaatggcacagggaaaagtagaaatatgtggtgtgaatacagcaaagcttccgatcctgaatgaaaaggagaaggaagctttgtttgtgcgtattaaagcgggagatcaggaagcgaaagaagaatatatcaaaggtaatctaagacttgtcttaagtgtaataaggaggttcggtgcaagtggagagaatccggatgatctgttccagattggctgtattggccttattaaagcaatcaataattttaatacagaattagaggtaaaattttccacttatgcagtacctatgattatcggagaaatcagaaggtacatgagagataataattccataagagtcagccggtcactcagagacactgcatacaaggcaatttatgctaaggaaaactatatgaagaagaatcagaaagagcctacagtacaggaaatcgctgaggagatcggaatatccaaagaagatattgtatttgcactggatgcaatccaggtacctatgagccttcaggaaccggtgtacaatgatggaggagatgcactctatgtaatggatcagttaagtgatcagacgaataaagaagaaaagtggatagaagatttatcattggaagaagcaatgaaacatctgggagagagggaacggtatattataaagcttcggttttttcagggaaaaacacagatggaggttgcagatgaaatacagatatcacaggctcaggtgagcagacttgaaaagaatgcgttgaaaacaatgcgccagtaccttatctaagggctggcgtatcgctttgtgtgtcatgtatatgacaaaaaagtctgatagatttttttagtattgcatttttgacagtctcatactatgatatttgcaggagggatttgtataatgaaagcttgtatatttgacctagatggaacattaacaaatacattggaatctatgacatattctgtgaatctgacactgaaggagatggggctctcccagatcacaaaggatcagtgcagaatgtttgtcggaaacggagcaagagttctgatcgaagaatctctgaaagtgtcgggggatcctaaggcttcaagaattgaagaaggaatgaaaatttacggacgtatatttgatcagaattgtacatatcatgtaacactttacgaggggattccggagatgttaaaagcattgaaagacagaggaatccatctggcagtcctttcgaataagccggaccgtcagacggtaaaggttgtaaaagaaatctttggagataacatttttgactatgcacagggacaaaaagacggcatccgcagaaaaccagaaccggacggagtctggtatctgatggagcagatgcaggtatcgaaagaagaatgtctgtatatcggagattcggaagtcgatgcggcaaccggaaagaatgcaggccttaagacaataggtgtgctgtggggattccgggacaggaaaacgttagaaactgcgggagcagatcatctgatcgaaagaccggaagaactgttgcagtttgtgtaatattacgataagggaggttgagatgtatgtacgaatatgatgaagaatgtctgaagacctttatcctgaaccagggacagctgtttgacgaaccagttgctgagactttagaagaggctgaggcttttctggaggattgtatggcttctatcgtagacagcattgaagaagttaaagaattcctggatcaggagggaatggatatcagcggaatgtctgatgaagagatcgaagaggcatcggaagtatttgcacttccagatggacgttatcttatcgttgagggttaagatcagaacaagaacaaaagagagcaaaagaaaaagccgcgactactttgtagtttcggctttttttagtgcgttttcaatggcctgaacaatcaactgggaagtataaggagtatcggaagaatactgtatattctcaagagactgttttttatagacctgttcggcaatatcttcaatcgccggttcgataaaagggtacatggttgtgatggaatcattcagattcgtaaaacggattgaattgatatgcgtttcatccactgtgacctcaacttctaaagcagtattattcaacgtaatatcggaagtgtagattccgggagtgtagatcttcttatcattggatccggaatggtgtccgggacggaacatgaatatcaaaagcaggatcagaacaatggctaatactgcaaaaataacggtatagatgatttccttcatgtgaagtacaacaattttggttttggaactcatagcgagacctcctggtattttatttcaaagattgttttattttctataatgtatgaaaaaagtggaagaattattcatttaatttttccgtgacaaatgggaaaggttcttgtagaatggtaaaagaaatggaaggtgaagaattatgtttattattgcaggacttgggaatcctacacttcagtatgaaggaaccagacacaatgtaggatttgatgtcatagatatgctggcggacagatataatatttctgtagatggaagaaaaggaagagcgctggtcggaaagggaatcattgagggtcagaaagtgcttctggtaaaaccgcagacttacatgaatctcagcggggaaagcttaagagaactggtcaattattataagatcgatgaagaacatgaacttctggtgatctatgatgatatcagtttggatgtgggacagctaaggatccgtaaaaaaggaagtgccggagggcataacggaatcaagaatatcattgccaatctgggaacggatgtatttccgagaatcaagatcggggtaggtgagaagccgaagaaatatgacctggcggattatgtgctgggacatttttcaaaagaagaccgtgaattgatggaagaaggttatgaccgcgcagaccatgcggtgggaatgatcttaaatggagagatcgaggctgccatgaatcagtataacaggaaagtaaagcctaaggaggcataaaagatgcagggcttaatcgggccgttaaaagaactggcagagtttgaagaactctgcaagaataagaaaaaagatgtgggaatgatccgtgtgtgcggatgtgtgaattcccagaaatctcatatgatgtatgcacttggcgatggctgtaaatataaagtcatcgcctgttccagtgagacaaaagcaaaacaaatctatgaagaataccgtttcctggacagtaatacgtatctgtatccggcgaaagattttctcttctatcaggcagatatccgaagtaaagaactggtaaagcagagaatggaaggaatccaggcagtgctttcgggtgaaccggtaacggttgtgacaagcctggacggcttcatggatcatctggcaccgaaggaaagtattgcggaaaaagtacttaaggtacaaaatgacagcgttctcaaattggatgagatggcagagaagctttcggttataggttatgaccgggaagtgcaggtggaaggacctggacagtttgcggtacgtggaggaatcctggatatctatccgctgacggaagaacttccggtgcgtatcgaactctggggagatgaggtggattccatccgtacgtttgatgtggagagccagcggtcgatcgaaaatctgatggatattgtaatctatccggcggtagaattcccacagaatggtgagaagggtgtctcgtttctggattattttccaccggaggatacgatcctttttctggatgaaccggtacgtcttgtggagcgtggacagaatattgaagatgaattcatggaagcacagaagaaacgtctggaaagcggatatgatttggaagaggaagaagcaaaaatctttccggtcactgagatcctgaaaaagatcaattgttacagtagtatcggattctatgcactggggatgaaatgcaaaggactggaagtgagagagtcttatgagatccaggcgaaaagtgtgaatccgtataataacagttttgaaatgctgacacaggatctgaaacggttaaaaagaaatggatacagggtaattctgttgtcaggttccaggacccgtgcgaagcgtctggcggaagatttaagagattataatctgagcagttattacagtgaagatctggaccgggaagtgaagccgggagagatcatgacggcatacggatatatcgcagaaggttatgaatatccgatgctcaaattcactgtgatcgcagagtcggacattttcggcaaacggaaaaagaagaaaaagagaaagacatatgaaggccgtaagatccagagcttttcggaactgaaaccgggagactatgtggtccatgagaatcatggtgtcggggtctatcaggggatcgagaagatcgtcgtagacaagatttcgaaggattatatgaagatttcgtatgcacagggcggaaatctttatatcccggcaacacagctggatctgatccagaaatatgcaagtgccgatgccaagaaaccgaaactgaacaagttgggaacgcaggaatggaaccggaccaagacaaaggtgcgcggtgcggtaaaagagattgcaagggatctggtgaagctgtatgcggcgagacaggaacaggatggttatgtctatggagaagatactgtctggcagcgggaatttgaagagatgttcccgtttgaagagacagaagaccagatgatggcgattgaggctgtgaaaaaagatatggaaagccacaagatcatggaccgtctggtctgtggcgatgtcggattcggaaaaacagaagttgcgatccgtgcggcattcaaagcagtacaggagagtaaacaggtggtctatctggttccgacaacaatccttgcacagcagcattaccggacgttcgtgcagcgtatgaaagactttccggtgcggatcgatctgatgtgcagattccgcacgccggcgcagcagaagaagacagtcgaggatgcgaaaaaggggctggtagatattatcatcggaacacaccgagtgttaagtgaagatatgaaattcaaggatctcgggcttctgatcattgatgaagagcagagattcggagtacagcacaaagagaagatcaagaaattaaaggaaaatgtagatgtactgacgcttacggcaactccgatcccgagaacccttcatatgagcctgatcggaatccgtgacatgagtgtgctggaagaagcgccgaacgaccgtatgccgatccagacgtatgtcatggaatataacgatgagatggtacgtgaggcaattgaacgggaatgcgcaagacagggacaggtatattatgtctacaaccgcgtggaagatattgatgaagtggcaggacatgtgcagaaactggtgccggatctgacggttgcctatgcacacggacagatgcgggaacacgaactggaacggattatgtatgatttcattaatggtgagattgatgtactggtatctacaacgatcatagagaccggactggatatttccaatgcgaatacgatgatcatccacgatgcggatcgtctcggcctttcacagctttatcagctgcgtgggcgtgtcggacgctctaaccgtatggcatatgcattccttctataccggagagacaagatgttaaaagaagtggctgaaaagagactggcggccatccgcgagtttacggatcttggttcgggattcaagatcgcaatgcgggatcttgagatccgcggagcaggcaatcttctaggagcagaacagcatggacatatggaagcagtcggatatgacctttactgtaagatgctgaacgaggcggtgaagcagctgaaaggcgagatggaagaagaggagacatttacaacgacgatggatctgaatgtggatgcatttattccggcttcgtatattccgaatgaatatcagaaactggatgtttataaacggatcgctgcaatcgagaacagagaagagatggaagatatgacagaagaactgatcgaccgtttcggagatattccgaagaaagtagaaaagcttctggaagtagcggctctgaaggcgcaggcacatcagttgtatgtaacggcggtcgagcagaaaggcgaggtttacacatttaccatgtatgaaaaagcaaaagtacatccggagcggattccgaagctgattgaagattttcgtggcgagctgacgttcaaagcggatggggtgcagccatgctttatctatgagaagaagagaaggaatctgaaagagaagcagacagacgcattggaaagtacaaaaaatgtgttaaatgggttgaaaagattgataggcgaagaaaaaagcggtataattgacccattaagcaaataaaggcaggttaggataaatgaaaaaaagagcattaatattagcactggcaggaattatggcagcatcacttatcggatgtggatcactgaaggacgatgcagtagtcgtaaaagcaggggatgaagagatcacggcaggtgttgcaaatttctatgcaagatatacacaggctcagtacgaaacatactttgcaagctatctcggcggtgatgatatgtggagcagaaatgcatcagacggcaagacatatgaagaatctatcaagaagacacttctggatgatctgaagaatatggctcttctggaagaacatatgaaagattatgatgtaaagcttacaaaggccgataaaaaagcaatcaatgatgcagcaaaagaatttgacaaagccaattcacagaagaaaaaagacaaggtgtccggttctaaggaaaatgtaaaacgtgtcatgacactgatggcgatcgaacagaaaatgcgtgcggcaattgtagcagatgcgaatgtgaaagtaacggatgaagaagcgacacagaagcatatgcagtatgtagaatttgattatagtacaacatctgattcttcaagctcatcagatactacagtatccgaagcggaaaagaaaaaaaccaaagagacggcagaggcatttgccaaaggtgcaaagacagcagaagattttgctgcgtatgcaacggaacagggaacagaagccaaagatgccacgtttgattcggattcagtaagtccgtctaaggaagtcgtaaaagcagcagacaaattaggagaaggcgagacgacggatgtgatcgaaggtgacactgcatgctatgtggcaaaagttacaagcctcaatgataaaacggctacagagactaagaaacagtccatgatcacagacaaacaggataaatactataaaaaagtattaaagaaatggaaaaaagaagaaaagattacagtccataaaggtagctggaataagattagctttacaaaactgagtgtgaaagccaaagacacaagtacaaccggaacaggcagtacttctggtaactaagaggattaaaataatgggcagcatccatcgggtgctgcccattattttgtgatcactatgtgttcggaagaagcagcaggtggcggttctgtagataccatagtatacaagaagagctgccagcggcagctcttgaagattttatttcatgaaagtagatacgatctcgttgacgagcttgccgtcagcttttccctttactttaggcatcaggttcttcatgatcttgcctttatcctttgcggtaggagcatccagtcccatctctgcaagaacagaagcaacgacttctttgatctctgcttcatccatcatcttaggagcatactgttccagaacagccagacgcttgttgcattcttcgatgatctctgtacgatctgcaggagtcatatccagggtctcttttgtctgcttgatctcttttaagattacctgagtctcttcttccggtgtcaggtcttcgcgtttgtcgattgctttattcttaagagctgcaagcagcatggataaagtttcctttgtgtctttgtctttggctttcatggctttgaccatatcagcacgtacttcatcaattttactcatgattcattcctcctaatattttcttccaactattatacaaaactattgaaaaaatatccagtctaatatctgcatgaataattccttgctgttttcagcatactagccatatgttagaaaatatggaaaaaacagaaaaatcaggaggaagataaatgctatgaaggcaacaggaatcgtaagaagaatcgatgatctggggcgtgtggtcgtgccaaaagagatcagaaggacactgaggatcagggaaggcgatccgctggagatatttacagacagagaaggtgagattattctgaagaaatattcaccgatcggggaactgtctgcatttgcaaagcagtatgcggaaagtctgtcgcaggttctggaatgcctggtggggatctgtgatatggatcaggtagtggcagcagcgggaaatggaaagaaagagattcaggatgaagatattacgggagagcttggagaatttctgaaagaacgaaaaacacggaatgccaaagccggggaaaaaagatatgtaccgatcgtgagtgtatcagaaccttataaacaggaggtgatcagtccgattctgtgtgcaggtgatgtgatcggtgcggtttttctgctgaatcaggaacgtacggacagattcaaagatacagagctttgtcttgcggaatatacggcaaaggttctgggcaaacagatggaacaataggacgattgtaaacaaaaataagcgcataaatcagatgcttccttcataatctgtgatagatgaggagggaaagcatgggaaaaaagggacaaaatgaagtgtggatcatgtggatactgaaatctcttctggcagcatatgtagtgaccggaattcttttgatgatactggcaatggcgctgtataaattcgaacttacggaagaagctgtgacagcagggatcacagcggtctatctgctctctacatttgccggtggacttgtggcgggtaaacttgcaaagatcagacgtttcttttggggaattgtacttggaattctgtacttcgcatttctgttactgattacatggggaatctatcgtacatttcacggaagtggaacagagattctgatgacatttgcgctgtgtgcgggaggtggtatggcaggcggaatgatatcctaagaaaaagattgcgaaacctatgtcgaaatgttataataacgtaagttaagcaatagtaaggagggatacgaacatgaaacatgtaaaatcattgaataaacctatgaacagcaatctgaaaaaaagcggatgcggcgaatgccagacatcatgccagtcagcatgtaagacatcctgcacagtaggaaaccagacttgcgaacagagcaaataatttaaaaagatatgggatacttgggacagcggtctttagggtccgctgtttcttgttgccatgcatgtgacgaaaaggtccggtggaccttttttagttgtctgcggaattgttttttgattatttgacaacatatggtttttgacgggtagaaagataacgggaaattcccgatatgaaataagaaaaattagaaaggggtaccaaaggatatgattcatcagtaccgtaataatggatataatatcgttatggacgtgtacagcggatctgtacatgtggtagatgatgtctgttatgacgtgatcgcggaagtgaacaagtcagaaacagaaccaactgccgaatcgttaaaagaagcggatgtaaaagaaaagcttttacagacacttggaaacaaatatgaaacatccgacattgaagatgcattatcagacgtgatcgaactgacagaaggcggtcagttatttgtaaaagatacatatgaatgcatgatcgaagaagtaaagaagagaaagacagttgtaaaggcactgtgcctgcatattgcacacgactgtaaccttgcttgcaaatactgttttgcagaagaaggggaatatcatggaagacgagcacttatgagctatgaagtcggtaagaaagcgctggacttcctgattaagaattctggtaaccgccgtaatctggaagtagatttcttcggcggggagcctctgatgaactggcaggtggtaaaagatctggtagcttacggaagagagcaggagaagatacataataagcatttccgttttacgatcacaacgaacggagtgctgttaaatgatgaaattcaggaatttgtaaataaagaaatggacaatgtagtgttgagcctggatggacgtaaagaaatcaatgatcagatgcgtccgtttagaaatggaaaaggaagttatgatctgatcgttccgaagttccagaaacttgcagaaagcagaaatcaggaaaaatattacattcgtggtacatttacaagaaataatctggatttctccaatgatatcatgcattttgcagacctcggattcaaacagatgtcgattgaaccggttgttggagatgaaagtgatccgtatgcgatcagggaggaagatcttcctaagatcagggaggaatatgataagctcgccaagatgatgatcgaacgcgagaaagaaggaaaaggcttcaatttcttccattttatgatagatttaaatggtggaccatgtgtggcaaaacgtttatccggttgtggatccggaacagagtatctggctgttacaccatggggagacctctatccatgccatcagtttgtcggacaggatgatttcctgatgggtaatgtggatgatggaatcgtgaagccggagattgctgacgatttcagaagctgcaatgtgtattccaaagataaatgcagaaactgctttgcaaaattctactgcagcggcggatgcatggcaaactcttataatttccatggtacgatccatgatacttatgagatcggctgtgagatgcaaaggaaacgtgtagagtgtgcgatcatgatgaaggcagcacttgcagatgaagaataatatttcgagaggatgtgtaggagaacgatgaagaagtcaaaaagcatactgagtttgcttctggctgtaattctcatcgtcggacttggatttactgtgattacaggaattggcaaatctaagtccggtgcgatgaaaaacatcaaacttggtctggatcttgccggtggtgtaagtattacctatcaggtaaaagataagaatccgaccaaagaagagatgagcgatacgatctacaaactgcaaaagcgtgtagaacagtacagtacagaagcaagtgtataccaggaaggaaatgaccgtattaacattgagatccctggtgttacagatgccaataagattctggatgaacttggaaaaccaggttccctttcattccagacagcggatggagaaacagttcttacgggaacagatgttaagagtgcgtctgcgaaaaccggtcaggatgacatggggaataaagaatattctgtagagttgaatctgaccaaatcaggtaccagcaaatttgcaacggcaacgaaagaaaatatcggaaaacagattgcgatcatctatgatggtgagacaatctcaagtccggtcgtacggtctgagatcacaggtggacaggcctatattacaggcgacttcacttatgaagaagcagataatctggcatctacgatccgtatcggtggactgaaacttcagcttgaagagctgcgttccaatgtagtaggagcacagcttggagaacaggcattgaatacaagtttaaaagccggtattattggtctgatccttgtattcctgttcatgatttttgtatacagacttccgggactggcatcaagccttgcgctggtcatctatacagagatcgtacttgtaatattgaatgcgtttgatgtaacgctgacccttccgggtattgccggtatcattttaagtattggtatggcagtagatgcgaatgttatcatctttgcccgtgtacgtgaagagatggcaagaggaagaagtgtaaaagtatccttaaaatcaggattccagaaagctatgtcagcaattgttgacggtaatgtgacaacactgatcgcggctgcggttctgtggtttaaaggttccggaacagtcaaaggatttgcgcagactctggcaatcggtattgtggtatcaatgtttacagcactggtgattacacgtatgatcgtgtttgcgttctatggaatcggaatccgaaaagagagtctgtattaccataagatgaaagaaagaaagccaatcaacttccttggcaagaagaaagtgttcttcagtatttctattgcaatgatccttgcaggattcgtggttatgggagtacattctgcccagggtaacggggcattggcttacagtctggatttcaagggcggaacatctatgaatgtgaagtttgacaaagattattccatcgatgagattgataaagagatcgttcctgttgtagaaaaagtgacaggagatcataatatccagacacagaaagtatccggaacaaaacaggtagtcatcaagacagtaactttaagtctgtctgaacgtgagaaggtaaataaggcactggaagataattttggtgtaaaagaatctgatatcacagcggaaaatatcagttcaacgatcagtaatgagatgcgtcaggatgcagtgatcgcagtgatcgtggcaacaatttttatgttgctttatatctggttccgtttcaaagatgtacgttttgctacaagtgcggtgctggcattattacatgatgtactggttgtactggcattctatgcagtatccagaatctcagtcggaggtacatttattgcttgtatgctgacgattgtaggttattcgatcaacgcgacgatcgtaatctttgaccgtatccgtgaggaacttccgcttatgaagagaaatacagatctgtcagaacttgtaaataagtgtattacacagacactgacaagaagtatttatacttcactgacaacatttatcatggttgcggtactgtttattatgggtgtaagttctattcgtgagttcgcagcacctctgatggtaggtatcgtctgcggtggatattcttctgtatgtgttacaggagcactgtggtatgtaatgaagacgaaagtcggcaaaaaagcacagccaaagaaaaagaaaaaatagatcataaaatgaaccgggaagcagttatgcctattgacagggcataactgctttttttaaaatagagacataatattctgacggacagatacaaaggggataaagataaatggaacgatgggttctgctgcgcaaaggtgcagattttgaagcgataggaaagaaatatcagattagtccgagactggcatgcctgatccgcaacagggatgtgatcggagaagaggcaatcgaacgttatctgaatggaacgatcagtgatctgtatgatgggatgctgatgaaagatgcggataaggcgattgacattttgaaagaaaagattgcagaggagaagaaaatccgggtgatcggagattatgatattgatggtgtgaatgcgacgtatattttgctggaggggctggaacgtctcggggcatatgtggacagtgatattccggaccgcataggtgacggatatggtctgaatcggcatctgatcgaccgggcttacgatgccggaatcgatacgatcattacctgtgataatggaatcgcagcagcaaatgagattgcatatggcaaagaactgggcatgacgatcatcgtaacggatcatcatgagatcccgttcgatgaaatagacggagaaaagatatacagacttccaccagcggatgcagtgatcgatccgaagcagaaggactgtgtatatccgtttaagggactctgtggcgcggcggttgcatataaactgatggaggcgttgtgggaaagcatggggaaagattccactgatctggatgatctgattgaaaatgttgcaatcgcaacggtcggtgacgtgatggatctggaggatgagaaccggatctttgtcaaagaaggactgcagatgcttaagcgaacgaagaatccgggactgaaagcactgatagaatgtacaggaattgataaagaaagtctgaattcttatcatatagggtttgttctgggcccctgtatcaacgcaagcgggaggctggatacagcaaagcgggcactgaaacttctgcgggtgcgtacacagaaagaagcggatattcttgcgggtgatttaaaagcattaaatgacagcagaaaggatatgaccgaagaagcagtaaagcttgcgaaagaacaggtggagacgacagatttatccgacgacagggtactggtcatctatctgccggattgtcatgaaagccttgcggggattgttgcgggaagaataagggaatgctattacaaaccggtattcgtactgacggatgcagaggatggtgcgaaaggatccggacggtcgatcgacggatatcatatgtatgaggaactgaataaatgcaaagatatcctgacgaagtttggcggacaccggctggcagcaggactttctctggaaaaagagaatatcgcagaattccggagaagactgaatgagaactgcaccctgacggaagaagaaatgaaagaaaaagtcacgattgatatggagatgccgtttctttgtgtgacggaagaactggtgaaagagctggaacttctggaaccattcggaaaagggaatacaaagccgatatttgccgcacgcggagtgacgcttctgggagcgagaatacttggaaagaacagaaatgtactgaagataaaggcgcaggatgcaaacggaagtgtcatagaagccatgctgttccagaatgtggaaggattcttaaagaatatggaagagacctacgggcgcatggaggtggatgctcttttacaaggcagaggcggtcatataaaaattgcggtgacttattatcctgatatcaatgaatatatgggaaagagaacaccgcagattgtgatcacacattaccgttaagctggtttctctcgttgcagggtgaaaaccatagattgaaaatcagaacgagtaatggtatacttaaagttgtattttagacagaaatggagagagtatcatgaaaccgatagaagagtatgtaagaagtattccggattttccggaaccgggaattatattcagagacgtaacaagcatccttcaggatgcagatggattacatctggcgatagacctgatacaggaaaaattaaaagacgtggattttgatgtggttgtaggaccggaatcaagaggatttatctttggtgtaccgatcgcatataatctgcacaagccatttatcccaatcagaaaaaaaggaaaactcccatgcgagacggtttctgttgaatatgaactggagtatggcacagccacgatcgagatgcacaaagatgcaatcaagccggggcagaaagtggttattattgatgacctgattgctacaggcggaaccaacgaggctatggtgaagatgatcgaaagcctcggcggagaagtggtaaaagcagtatttctgatggaacttgccgggttaaaaggaagagaaagattagaaggatatgatgtggacgctgtgatcacatatcctggaaaataaaaagagagaaatcaagggaaggaggcgttaatatgtctgataagacaacctatgaatcactggacaaccggatcgcaccggaagcactgacagaagatcacacgaaagggcttgcagttgtagacgggcatgcggtaaaatctcaggaagattatgaggacccgaaccggttatatgacatgttaattgcccgtatccgaaagtatcatccgtccacagatgtttccatgattgaaaaggcttataagctggcggtaaaggcgcatggagatcagcgcaggaaatccggagaaccatatatcatccatcctttgtgggtagcgatcattctggctgatctggagatggataaagagacgattgcggcaggtatgctgcatgatgtggtagaagatacaaagtttacggaagaagatatccggagggaatttggagatgaggtagcacttctggtagatggagttaccaaactgggaagactctcttattcatcggataaactggaggtacaggcagaaaacctgcgtaagatgttccttgccatggcgaaggatatccgtgtgatcattatcaaactggcagaccgtctgcataatatgcgtaccttgcagttcatgacgccggcaaagcagaaagaaaaagcgaaagagacgatggacatctatgcgccgatcgcacagcgtcttggtatatctaagatcaagacggaactggatgacctggcacttaagtattcccagccggaggtgttctatgacctggtgaaccagatcaatgcaagaaagacagagagggaagaattcgtagagcagatcgtagaagaagtatcgacacatatgaagaatgcgaatatcaaagcagaggtcaacggacgtgttaaacatttcttcagtatctataagaagatggtgaatcaggataagacggttgaccagatctatgatctgtttgctgtgcgtatcatagtagaatctgtaaaagactgttatgcggcgctgggtgtgatccatgagatgtatacgccgattccgggacgttttaaagactatattgctatgccgaagccgaatatgtaccagtcactgcatacgacactgatgagttcggtcggacagccgttcgagatccagatccgtacagaagagatgcataagacagctgaatatggtatcgctgcacactggaagtataaagaatccaatgatggtaagaagagtgtggaggcacaggaggaagagaagttaagctggctgcgtcagatcctggagtggcagagagacatgtcggataacagagaattcctgaacctgatcaaaggagatctggatctgtttgcagaggatgtctattgctttactccgcagggagatgtaaagaacctgccgaatggttcaactccgatcgattttgcttatgcgatccacagtgcggtcggtaacaagatggtaggagccagagtcaacggaaaacttgttaacattgattataagatccagaatggcgacagaatcgagatcctgacatcccagaattccaagggaccaagccgtgactggctgaatattgtaaagagtacccaggcaaagaataagatcaaccagtggttcaagaaagagttcaaggaaagcaatatcatccgcggtaaggatatgattgcgacgtactgcagagcgaaaagtatcaatgttgcaaatatcatccagccgaaatatcaggagattgttcagaaaaaatacggattcaaagactgggattctgtattggcggcaatcggacatggcggcttaaaagaaggccaggtcgtgaatcgtcttgctgaagaatatggaaaagatcacagacaggcaattaccgatgaagttgttctggagagagtggcagaagcagcgaagaataaagtacacattgccaagtcaaagagtggcattgttgtcaagggaattgatgatatggcagtccgtttctccagatgctgtaacccggtaccgggagatgagatcgtcggatttgttacacgtggaagaggactttccattcaccgaacggactgtatcaatatgatccacctgtccgaatcggaacgtgcaagactgattcctgcagagtgggagaccgaagtgacggaaaaatccggcggtcagtatcttgcagagatcaagatgtatgcgaatgaccagcagggacttctgatggagatatcccgaatctttactgagggaaacgtagatgtcaaatctatgaatgtccgtaccagtaagaagggaacggcaacgatcgagatgggattcatcgttcacggccgtgaagaattggagcgcatcgtgaagaagctgcagcagctttccggaatcatagatatagaaagggcaacaggctaaaagtatgaagatagaaaaatacgtagtgggaatgatcggtaccaattgttatctggtgatcaatgaagagacaaaggatacggtcatggttgacccgggagcatatccggcaaaattaaagaatgccgtgaaagagcagggactgaagctgaaggctgtacttctgacacatgcacattttgatcatattatgggactttccgatgtgatggaagatataaaagttccagtatatgtggaagaagcagatctaccgatgatgatggacggtgaaagcaatctgtcttctggttatatgcgcggaggatatcagttcgcagatgcggttccggtcagagacggacagcagcttcaaattgcaggctttcagttccgtgtgatccatacaccggggcatacaccgggcggatgctgctattatatggaacaggaagatgttctttttagcggtgatacattgttccgtacatccgtcggacgttcggacttcccaggtggaagtgcatcagcactggtccgttctgtaaaagaaaagcttttgatattaccggaagagacgcatgtatatccggggcatatggaagagacgacgattggttatgaaaagcgtcataatccatttgtataatgaacgataagaaaagacagtgaaagaaaacggaatggagaaatagaatgattcagattatatgtaaaagcgagtcttatacttataatgcgtatcatatattaaaggctttttatccgtcacaggaagtatcctgtaagacggatgaaaaagcctctaattatgtaatggtacatttgccggatgaccgtgaaatttccgtgggatttgagaacaccgtggaaattactgacacagcagatcgggatgaaagcacagggaagatacaggaagattcagagaaggagagccagaaaaaagaaagaaaacggcagattgatctgagcctgtatgatcagctggaaaggattacaggagagccgcttgcgtggggagtgcttacgggagtgcgcccgaccaagcttgctatgcagaaactggaagccggatggaaaaaagaagattatattaactgggcatgggaaagtgcgagagtgagaggagaaaaagcagctcttgcatgggagattgccgaaagagaacagaaaattttaaaagaactggattacgagaacggatatagcctgtatgttggaatcccgttctgtccatcggtctgttcttactgttctttcagttccggaccactggatcgctggaaagaaaaagtggatgcatatgtggatgcactttgcaaagagctggaatttatcgcagaacgctcgaaaaacaaaaaattaaatacgatctacatcggcggaggtacgccgacaacgctgacggcagagcagctggaacggctgatgagctggatcgatgagaagttttcgagagaatacctgctggaatatacagtggaagccggaagaccggacagcattacagaagagaagttgaaagtcataaagaatcatgacattacaagaatttccattaatccacagagtatgcagcagaagacgctggatgtgattggaagaaaacataccgtagaagagataaaagaagcctatgcactggccagaaagactggattcgataatatcaatatggatatcatcgcaggacttccgggagaagatatttctgacatggaagatacactggcacagatcgcacagatgcatccggacagtctgacagtgcattcactggcgatcaaaagagcagccagaatggagatggaggatttgaaccgggatgcgaaagagacgcatgagatcctttccggcatgatcgagagggctgcaaaggcagcaaaagagatggatcttttcccgtattatctgtacagacagaagaatattgcggggaattttgaaaatgttgggtatgcaaaggttgacaaagccggaatatacaatatacttattatggaagaaaaacaatctattattgccgcaggagcaggagcatcgacaaagattgtattgaaggatccgattcctatgccgggcagtaaaaagaagaaaatgacgcgtctgatccgtcaggagaatgtcaaggcggtagatgcctacatcgacaggatcgacgaaatgatagaacgcaaaggagaatggttatggcattaaagaagaaaccggttaccggtatgaaagacatgctcccacgtgagatggagatccgtgattacctgatcggactgatcaaagagacgtataaaacatacggattctgttccatcgagacaccatgtgtggaacatatcgagaacctgtgcagcaaacagggcggagacaacgagaaactgatcttcaagatcttaaaaagaggagaaaaactgaagatcgatacagcaaaagaagaaaacgatctggtagacggaggactgcgttatgatcttaccgtaccgcttgccagatattatgcaaaccattcgaatgaattgccggcaccttttaaggcattgcagattggtaatgtatggagagcagaccgtccgcagaaaggacgtttcagacagttcatgcagtgtgatattgatatcttaggagagccgggaaatctcgcagagatcgaactgatccttgcaacgacagctatgcttggcaaattaagcttccagaactttacggtatgtatcaatgaccgtaatatcctgaaagcaatggctgcttacagtggtttccgtgaggatgattatgatgaagtcttcatcattctggataagatggacaagatcggtgcagaaggtgttgcgaaagaattagaagagatgggatatgtaaaggaaaatgtagagacttatcttcagttatttaaggatgtagcaccagatgtaacaggtatccgtttcctgaaagaaaaactgggcgactgcttaagtgaagagacagcagacagtatggaaatgatcatttccagtgttgagaccgcaaaagaatgcgaattcaatatcaaattcgatccgacacttgtaagaggacagtcttactatacaggaacgatctttgaagtgacgatggatgatttcggcggatctgtagccggaggcggccgttatgataagatgatcggtaaattcaccgggcaggatacacctgcatgtggattctcaatcggattcgaacgaatcgtcatgctgcttctggaaaatggatatgaagttccgactgtaaaagagaagaaagcatatctgttagagaagaagatgacaaaagaagggcttttaaaggttatgtcacttgcaaaggcagaccgtcaggcaggaaaacaggtcctgatcgtcaacatgaagaagaataaaaagttccagaaagaacagcttactgaagacggttatacagaaatcgtggactgttatgcagattccgtggaaaatttataagatatataggaaacaataaattacggcgtaaggacgtcggaaaaggagataaagaaacatggcagaatcaatgaaagggttaaaaagaacccacagatgtacagaattatctgcagccaatgtaggagagaaagttaccattatgggatgggtacagaagaaccgtaataagggcggtctggtattcgtagatgtcagagaccgttcaggtattatccaggtggtattcgaagaaggaaaatgcgaagcggcactgatcgaaaaggcagctaagcttcgtgcagaatatgtagtagcaatcgtaggaacagtagcaaaacgttccggtgcagtgaatgatcatcttgcaacaggagagatagaggtgattccggaagaacttcgtattctttctgaatcagagacaccgccgttccacatcgaagagaattctaaaacaaaagaagaagtacgtctgaaatacagatacctggatcttagaagaccggatctgcagcgcaatctgatgatgagaagcaaggttgcaactctgacacgtcagttccttgcggaagaaggatttcttgagattgagacaccggttctgatcaaaagtacaccggaaggagcaagagattacctcgtacctagccgtatccagcagggacagttctatgcgctgccacagtcaccacagttattcaaacagttactgatgtgttcaggatatgacagatatttccagatcgcaaaatgcttccgtgacgaagatttacgtgcagaccgtcaaccggaattcacacagatcgatatggagttatctttcgtggatgtcgatgatgtaatcgaagtaaatgaaagactgcttgccaaattattcaaagaagtactgggcgtggaagtatctcttccaatccagagaatgacatggcaggaagcaatggaccgctttggttcagataagccggatatccgttttggtatggaactgacaaacgtaacagatgttgtaaaagactgtgaatttgtagtgttcaaaaatgcgatcgaaaatggtggaacagttcgtggtatcaacgccaaaggacagggcggaatggctcgtaagaagattgataaactggttgattttgcaaaagattatggtgcaaagggacttgcgtatattgcaattcatgaagacggaacagtgaaatcctcatttgccaaattcatgacagatgatgaaatgaaagctctgatcgaagcgatgggcggagagaacggagacttgttattatttgctgcagataagaataaagttgtatgggatacgctgggagcacttcgtctggaactcgcacgtcagatggaacttcttgacaagaatgaatacaaattcttgtgggtaacagaattcccacttcttgagtggagcgaagagcagaaccgttatacagctatgcaccatccatttacaatgccaatggaagaagatcttcagtatattgacagtgatccgggaagagtccgtgcaaaagcatacgatatcgtattgaatggtaacgagattggtggaggaagtgtcagaatctttgatcaggatatccagagcaagatgtttgaagtgcttggatttacagaagagcaggcacaggagcagtttggattccttctgacagcattcaagtatggagtgccgccgcacgcaggacttgcatatggtctggatcgtctggttatgctgatggcaaaacaggacagcatccgtgatgtaattgcattccctaaagtaaaagatgcatctgatcttatgacagaagcaccgggacatgtagatgcaaaacagctggaggaactcggaattgcggttatagcaaaagaagagaaaaaggcagaagacaaagaataaagtaaaagctatataaagtaaaagatgcgggaaaaccaaagaggaggttgctcccgcaccttttttatcactatgcgttcgtaaggagcggccacttgccaaagcatgcaggaaaagttgtcggagttttcaaattaaaagaaaaattcaaaaaattaaaaaaagcagttgacaataccatatatatacgttatactgaatatcgttctgatgaacacaaaataataaaacatacttgatgtgcgatagtagtacagttggtagtacgccaccttgccaaggtggaggtcgcgggttcgagtcccgtctgtcgctctgaaaagacgttgcaagtagttgctatgcgatagtagtacagttggtagtacgccaccttgccaaggtggaggtcgcgggttcgagtcccgtctgtcgctctgaattgactatttgtgacgtctttttttatgctgattaattatgtgggtgcggatttgttactgtgcagaaaggagattaaactgtactaatttccgagcgtgggaagaatcggattgaaattatatgtagcactatgctatactaaagtctgtataagcaaagctgcagaatctgccgctggcagaatatctgtagatacgaaaacgaaaagagagtgaacaaaaaacgaggatgtgagaagatgaatcaggaaagagtagtaaaagcaggtcttctgggacttggaacggtcggcagcggggtgtataaacttgtggaacgccagaagaatgaaatggcattgaaagccggtgcaggtcttgaaattcagaagatactggtacataacatgaataagaagagagagggtgtagaccagtctcttttaaccgataagtgggaagatatcatgaatgatgatgagatagaaatcgtaatcgaagtgatgggtagtatcgaacctgcaagaactatgattctggaagcactgcatgcaggaaagaatgtcgtgacagcgaacaaagatctggtagcgacacatggacacgaacttttggaggcggcagaagaaagtggagtggatttcttatttgaggcagctgtggcaggagcaatcccgattatccgtccgctgaagcagtgtctggcggcgaatgagattcaggaagttatcggtattgtcaatggtacgacgaactttattctgaccaagatgatcgaagaagggatggattttgacgaggcactggcactggcaacagagcttggttatgcagaggcagatccgacggccgatattgaaggactggatgcaggacgtaaggtagcgattatggcatcgattgcatttcattccagagttacattcgatgatgtatatacagaaggaattacaaaaattactgcgaaagatgtggaatacgcagaagaattcggtgatgtgattaaattactcggtgttgcgcataatacggaagaaggaattgaggttgctgttcatccgatgatgattccgaaggaacatccgcttgcatccgtgagagattcgtttaatgcagtatttgtccgctctgatgctgccggtgatacgatgttctacggaagaggagcaggggaactcccgacggccagtgcgatcatgggtgatgtgatcgatgtgatccgtgatatacaataccattgtacaggaagaatcagttgtacctgttatcgtgagacaccggtaaagaactttaaagaagtaaagaacaagttctatatccgtatgctggtggataataaaccaggtgtacttgctgcaattgcaagtgtattcggagtgcataaagtaagtattgcaagagtgattcagaatacaaaagaagatgatgcagcagagcttgttatcgttacagaagcagtaaaagaaaagcatctggaagatgcactggctcatctggtggatatggatacgacacgggagattggaaccgtgatccgtgaatattaaataataaatagcagaatattttcagaggacggaggccgtaacaagctccgtcttttataatcaccgtatggtgaaaatcaaataagaatccatgaataattggtgagaaaataaggagtgaaagaaagttgaaagaacagaaaaaagtgaatcctctggcaacagaaagcgagggaaaactgatcgcgaaattcgcaattccggcaattatcagtatgctggtgagctcattatataatattgtagatcagatctttatcggacagggagtcggacttctgggaaatgcagcgactaatattgcatttcctgtgtcgatcatctgtacggcaacagcacttcttcttggaatcggaagtgcgtcgaattttaatctgtgttccggagcgggagatcatgagaaagcaagcaggattgcggggaccgggctttccatgctggtgatctgtggtgtgatcattgcagcagtggtactggtgttcctggatcctctgctgcatcttttcggtgtgacgacaaagattctgccatatgcacaggattatacaggaattacggcatttggaattccgttcctgattttgacaaccggagggaatcatctgatccgcgcggacagaagtcctacgtactctatgacttgtatgctgacaggggcaattattaatacggtgttagatccgctgtttatctttggattccactgggggatcaaaggcgctgcgtgggcgaccgtgatcggacagatcgtatccggaattatggtaattgtatattttggaagatttcgtaaaatggagctgaaaaaagagatgttccgtccgagaggccatctcctgaaaatgatcctgtcattgggaatggcttcctgtatcaatcagattgccatggctgtggtacagattacaatgaataatacactgcgctattatggtgcggcttctgtatatggaacagatattccactggcgtgtgtgggcgttatctcaaaggtaaatatggtgttcatggctattgcgatcgggatttcccagggatgtcagccaatctggggatataattatggagcgggatcgtatgacagagtaaaacgcacttattggaaagcattccgcgttgctatgacggttggaattgtgttcttcttgtgtttccagtttttcccgacgcagcttgtgagtatctttggtacgggaagcaaagaatattatgaatttgcagcaagatatttcaggatttttatgtttatgacatttgttaatggaatccagccaatgtcatccggattctttacatcaattggtaaagcgaagctgggtattgtagtgtcgcttacaagacaggtaatctttttacttccgctgatacttatattcccgatttttatgggaattgacggggtgatgtatgcgggaccgatcgcagatgcggcagcgggaattgtcgcaattggattcgctgtaaaagagattcgcgcgatggataagattgcatagcctgttggaatatggtaaaataaattgaaatagtctgggtatttatgaatacccggactgatgacggtattacagggaaatgggagaatacaagggatgaaagaacgattacccgttggatttatgttcaaacagatcaataatatttatgaaaaggaattcaataacctgcttcgggggatagggatcacatcatcgcagtgcgcggtgctggattatcttcttggcagcagtaaggagtttgtgaatcagaaagacattgaaaaggcgttaagtcttaagaatccgacggtaacgggaatcttaaaaaggttagatgaaaaaggattcattctggcagttccaagtaatcaggacaaaagatgcaagaacatttacccgacggaaaaagcatatgatattcagaaaaagatggacaattaccggaagaagatagatcggaggctgacgatcgggatgagtaaaaaggaaatcgcggcattggaaaagatgctggaccggattctttataatatcagtgatccgtaaagagaacaggaaaaggacaggagaaacaaaaaatgagttatgcagacaaagtatttatcaatatgtgccgtgacattatcgataacggtaccgataccagaggcgaaaaagtaagaccggtatgggaagatggaacaccggcatatacgatcaagaaattcggagttgtgaacaggtatgatctgtcgaaagaatttccggcactgacacttcgaagaacagcaatcaaaagctgtacggatgagcttttgtggatctggcagcagaaatcgaataatatcaatgatcttcacagtcatatctgggacagttgggcggatgaaaacggttcgatcggaaaggcttatggatatcagatgggcgtaaagcaccagtataaagaaggcatgtttgatcaggtggaccgtgtaatctatgaccttaagaataatccatacagcagaagaatcatgacgaatatttatgtgcatgaagatctgcatgagatgaatctctatccgtgtgcatacagtatgacatttaatgtaaccaagaaaccgggacatgataaactgacattgaatgcaatcctgaatcagagatcgaatgatgtccttgcggcaaataactggaatgtatgtcagtatgccgtattgatccatatgctggcgcaggtatgtgatatggaagtcggagagttcgtacatgtgatcgcagatgcacatatttacgacagacatgtgccgatgatagaggaactgatcagccgcaagccgcttccggcaccgaagttctggctgaatccggaggtcaaagacttttatcagtttacaagagatgatgtaaaattgatcgattatcagacacatgatcagattaagaatattccggtggcagtgtagaagaaatattattagccggtggcagtcagagataagaatatatcatacgtaaagaggagatgtagattatgaatttgatcgttgcagtagattcaaactgggcaataggaaaagaaaataagttactggtgagtattccgcaggatatgaagtttttcagagagacaacgaaagggaaagttgtagcgatgggaagaaagacactggaaagctttccgggcggacagccgcttaagaatcgtgtgaatgtagtacttacaacagacaagaactataaagtaaaagatacagttattgtacataccatagaagagatggtggatgaactgaaaaaatatgattcggaagatatatttgtgatcggtggagagagtatttaccgccagctgcttccgtattgtacaaaagcatatattacaaaaatagaccatgcatatgatgcagatacatatttcccgaatctggatgaggatccggagtgggagatgacgaagatcagtgacgaacagacttattttgatctggaatatgtgtttacaatctacgagaggagataacagatcgaaaatgagagtgcttagtgtcacggcgcagaagccatgcagtacgggaagcggcgtctatctgaccgaggtggtgagatctctggccaagatgggtgtttcgcaggccgtggtggcgggcgtcacaagagaggatcgggtggatatgccggaaggggtaacggtatatccggtatatttttcgtcagaaaagcttccgtatccggtagtaggaatgtcggatgagatgccttataccagtacaagatatcgggatatgacagaagagatggccggacaatttaaagctgcatttcttgaagttctggatgaagcaatagaaaaagaaaatccggatattatcttatgccatcatttgtattacctgacggcgttgataagagcacattattctgctaaaaaagtatatggattttgccataatacggatctgagacagatggagagtattttatttgaaagaaattttatcaggcaggagattccgaaacttgacaggatatttgcacttcaggaagcgcagaaagaaaaaataaaaaaaatatatccggtatcagaaaaacagatgactgtgataggaaccggatataacagtgaggtctttaaaaagacaggcataaaattaagcaggaaagacggaaaaatccgtatgatttttgcggggaagattacacagaagaaaggtgtaaaaagtcttctgagagcattgaatcttctggattatgaaaaagaaaaaatacaacttattcttgccggaggtgccggaaacctcgttgaatatgaagagattaaagaactggcagatggatgcagatatccggtagtgtttgctggatgtgtaacgcaatcaaggcttgcagagctatacaatgactgtgatatttttgtgcttccgtctatgtatgagggccttccgttgactgtgattgagagtctggcctgtggtgacagggtagtaatgacgaaattggaaggaattgccgagtggcttgctgatatggtcccggacgcagatatccggtacgtgttacctccggagatgaaaggaacggatgaaccgctggaggaagaattaccggcatttgaaagcagacttacagaagctttacgggaagcaattgaggaaaaagatacaaaagaatgtgatgtcagcaggatttcctggcaaaaaatcgcacgggaagtaatccggtaaaatgccaaagagcctgccgatgccaacgttgtttccatactatggtattataaaaagtgggaagatgattgatttcatcttcccgcattttttatgctgtacgttctacagtgtatcatttcttcttacatatccaggacgatcctcggaagatgtaagctcttttacatgtgtgatcttggcgtgtttgtcaacaacctgattttcaatatgtacattctcaccgatgtatgcgccagaaagaactacgcagttcttaataacagccccttttttgatgatacatccacgtcctacaacagaatgttccagagaaccttcaatcagacatccgtttgatacaacagaatttttagcatttcctgtttcaaaatactgtgttgggcaggaatcatttgttcttgtgtagattggccagtttggatcaaacagattctgagcagttttaatatctgtcagagaaaggtttgaatcataataactcttgaaatcagagattgcagcgaaataacctttgtgagaaacaccgcggatatcgagttcatcacaggatgcattcacgatatctaataaagtgtatacagaagaagtcttttttgctttgtggatcagttcgatgaacagatctttcttcataacataagtatccatgaagatatttttattctttgcatttccgtgattctgttccagagaaagaactcctttctgcttgttcaggttcaatgcgtaacagttcaggaaatattcttttgcagtatctacagaatgatacagtaatgtaatatcagcaccggattcgatatgatcgtttaacagtttcttgtaatcctgtgtgtagaccatgtaacttggtgcaataacaacatattcggccagttcttgttcgatatattccaggttttcaatataagaagcaatgtcattgttatacagactcatgttcattccgagaccggaatagagaatctgaagattaccgctctttgagttgatattgtagtggcgtcctgttccaagatgcgcagtcaaagactgtggatttctgcggatatagacctgaatgtggtcgataccactgttactcatatttgagatagggaagtcaataacacgataacgtccaagaaaagagaatgcacctaccggacgatattcctgcatgccttccactctgatgtgatttccggcaaagtttacgattccaaatgctttagccatattattctaccccctttacacgtttggaaatgagctcgatatgttcgctctttgcgtcgccgacaacagcgcctgcaccaattttaacattatcagcaaccagtgcacgtgtaacgacagcattttcatctactactacaccaggcatcagtacactgtcgataatcttagcaccttttcctacttttgcacctgtgaaaagtacggaatttgtaatttcaccttcgattacgcagccctgattgacgaatgcatggttaatttcagcatccggtccgatatactgaggaagagcagtagcatcctctgtgtaaattttccaggtaggatcgttcagatccagctcgttgttcttactgagcagatccatgttggcttcccagagagaatcaatcgttcctacatctttccagtatcctttgaatttgtatgcatataatttctttccgtcattcagaagagttggtatgatatcttttccaaaatcatggttggaatcaggatctttcatatcggcaatcagttttttgcgtaacagtttccagttgaagatatagattcccatagatgcaagattactctttggatgttctggtttttcttcaaattctatgatacggttctcatcatctgtattcatgataccgaaacggcttgcttctttcatcggaacttcgataactgcaattgttgcatctgctccgttatctttatgttcctgcaacatcttatcataattcatcttgtagatatgatctccggaaagtaccagaagatattccggtgagtatgtatcgataaagtcgatattctgtgagattgcgtcagcagtacctctgtatacatccagattggcatctgctttctcacgtggtggaagaacaaaaacaccactttcttttgcgtctaatccccagcgtctgcctgcagcaacataactgtttaacagaatggattcatactgggttaatactcctactacattgatgccgctgttggcacagttactgagtggaaaatcaatgattctgtattttccaccataagaaacagctggttttgcaactttatttgtcagttcgtgaagacgtgagcctctaccgccggccaatatcatcgctaacatattattttgtttcataatatatcctccttattgcttatgaatatattgtataattttttgcaaatatttgccatatgatttttgaaaaaaatgggaaaaatcacaaatttttttgaaaaatacacttaaatttgtggaaaggatgaaaaaattgacagattatggtaaaaaaagcatgacaagaaattaacgaaatgaaaagagttgacaatattgtagaatatcacatataatattttataaatattcagtgaatgctatgacaaggaggagtacatagattcccgaagcaaagagagaagatggaaggtgcaagtcttcgtgaaggatttatggaagtagcctttgagctgtgaaccgaaaggatatagataaagtgtaagaatatctgagtagacttcaacgcagtcccagcgttatcagggaggcagtatcggaaagtgaaaccaggataagggaaacgttcctgtactgaacagagagcagaaagtaatttctgaatttaggtggtaacacggatgtaatattcgccctgagctgacagcttggggtgtttttttattatatccggtatgaaaatgatcagatttcaaggaggtagtatatgaagaagatcagtggcaataaattactggtaaaagcactgagtgaagagcaggtggatacaatattcggttatccgggagcctgtacaattgacatcagtgacgaactttataaacaggattatacaaaggtgatccttccaaggcaggaagtggcattggtgcatgaagcagatgcttatgcaagatcaacgggaaaagtaggtgtatgtcttgttacgagcggacctggagcaacgaatcttgtaacaggacttgcaacagcatattacgacagtgtaccgcttgtatgctttacaggtcaggtatccagacacctgatcggtaatgatgcatttcaggaagttgatatcgtaggaattaccagaagtatcacaaagtatggtgtaacagtaagaaacagagaagatctgggacgtattattaaagaagctttttatattgcaagaacaggaaggccgggcccggtactgatcgatcttccaaaagatgtgatgggcgaacttggaaatgccgaatatccgaaggaggtaaatatccggggatataaaccgaatacacatgttcatgtaggacagttaaaacgtgcgatcaagatgctttcaaaagcaaagaaaccattattccttgccggaggaggcgttaatatcgcacatgccaatgaagaatttacaaaactggttgacatgacgaacgttccggtagtcacaactgttatgggacgtggagcgatttcgacgacacatcctttatatattggtaatcttggaatgcatggcgcatatgcgtgtaatatggcggtaaatgagtgtgatctgttattctcgataggaaccagattcaatgacagaattaccggaaagcttcattcatttgcaccaaatgcacagattgtacatattgatattgatacagctgcaatttcaaaaaacgtacaggtagatgtacctatcgtggcagatgcaaaagaggcagtatcaaaaatgctggaatatgtatctgagtgtgagacgaagaagtggcttgcgacgatcgaagagtggaaagaggaacatccactgatgatgaagaagaaaccaatcatgacaccacaggatgtgatagaaacgatcaaccgtatctttgatgaggcaattattgtaacagatgttggacagcatcagatgtttacggcacagtttatcgagatcacggaaaagaaaaaacttctgatgtccggcggtcttggaactatgggatatggtatgccgggagctatcggtgcgaagattggtaatccggatgtgcctgttatttcaatttcgggagacggaggatttcagatgaacagtcaggagctcgctacagcggtgcttgaagaactcccgatcatcagttgtatcttcaataataataatctgggtatggtacgccagtggcagaaattgttctatggaaagcgttattcgatgacctgtcttcgttccggagcagcctgcaggggaaaatgcggagaggtagagtgtccgacgtatacaccggatttcatgaagctggctgacagctatggcgcaaaaggaattcatattacaaagaaagaagatatcgaacctgcattcagagaggcaatgaagagtacaaagaccccatatatccttgagttcgacattgatccggaggatctggtgtatccgatggtaaaaccaggtggaacactggaagacctgatcatggattgttaagaataagagacgaaaggagataaaataatgaataataatggtatgaaaaagcgctggatttcattatatgtagagaaccaggtgggagttctgtcaaagatttccggtctgttttccggaaaatcttataatctggacagtctgactgtcggtacgacagaagatccgactgtatccagaatgacgatcgcgacagtcagcgatgatgagacatttgaacagatcannnnnnnnnnnnnnnnnnnnnnnnnnnnnnnnnnnnnnnnnnnnnnnnnnnnnnnnnnnnnnnnnnnnnnnnnnnnnnnnnnnnnnnnnnnnnnnnnnnnnnnnnnnnnnnnnnnnnnnnnnnnnnnnnnnnnnnnnnnnnnnngtacgtatgaaagaaatcttatatgtaaaagtacgtaaatgcacgaaagatgataaagtggaatgcttccagattgcagagacgttcaaggcgaaggtgattgactatgggaaagacagtgttctcatggaatttgttcagacggggaccaagaatgatgcagttatcaaactgatgaaagaagagtttgaaagtatcgaagttgtgcgcggaggaagtgttggtatcgaatcgatcagcatgatggaaagatagagattcacggtcgaaataaatcgaaaattaaaatgtataataaaaaaacagagtgcactcttgaattttgaaaacagtagtattataataagaaaagatgataaatcaaacagttgttaaaaggacggaggagtcaaaatggagaagaaaaatattgactggtcaaacattggatttggctatatgaggacagacaagagatatgtttccaattttaaaaatggagcatgggatgaaggtacacttacctccgatgaccagattacgatcagtgaatgtgcaggcgtacttcagtatgcacagacatgttttgaaggaatgaaagcgtataccacagaagatggtcatatcgtaacattccgcccggatctgaatgcagcaagaatggcaaattcagcagcaagacttgaaatgcctgtattcccggaagatagatttgtagatgcaatcaaacaggttgtaaaagcgaatgcagcttatgtaccgccatacggatcaggagcaacattatatgtaagaccatatatgttcggttccagtgccgttatcggtgtaaaacctgcagaagaatatcagttccgtgtatttgctacaccagttggaccatacttcaaaggtggagcaaaaccaattactattaaagtttctgattttgaccgtgcagcaccgcatggaacaggtcatgtaaaagccggactgaactatgcaatgagccttcatgcaatcgtaacagcacatgaagaaggatacgatgagaacatgtatctggatgcagcaacaagaacgaaagtagaagagactggtggagctaacttcatctttgtaacaaaagataacaaagttgtaacaccaaaatcatctaccattcttccatctattacaagacgttctctgatgtatgttgcagagcattatcttggactggaagtagaagaaagagaagtttacttagatgaacttggtgattttgcagagtgtggactttgcggtacagcagcagttatctctcctgtaggaaagatcgttgaccacggcaaagagatctgcttcccaagcggaatggaagagatgggacctgttacaaagaaactgtatgagacattaacaggaatccagatgggacatattgaagctccggaaggatggatttgcaagatctgctaataccagataccagaaaaagtatcagggcggacatccggtgaaacggatataaaacgaagatattatagaagaggcagggaactgagaattttctcagaaccttgcctctttttgaaaatgcgtgtaaagtatagaaagaataatcaggtgaaagggtttgatgtatgaaggatttattattttcaacactgaaaggttataaaaaggaatatcttcccaaggatatcttttcggggattattatggctgcggtgtccattcctatttcaatgggatatgcacagattgcgggacttcctgcagtatatggactatatggttcggtgttcccgattctgttctttgcattattttcaacgtccaggcagtttatctttggggtggatgcggcaccggcagcgattgttggggcagcacttgtgtcgcttggaatagaaaacggaagtaaagaggcaatacagtatgtgcctgtgatcgcacttcttacgggaatatggctattgttgttttactttttgaaagcaggaagaatcgtggactttatatcaacaccggttatgggcggatttatcagtgggattgcgcttacgatcattttaatgcagatcccgaagatattaggcgggaaagccggatccggggaacttccggaacttatcagacatattgtacagaccggtaaagagattaactggttgtcagtgatacttggtgcaggtgcgctgatattgcttcgtgtggcaggaaaaatgataccgaaatttccaatggcaattgttatcatggcagccggagtggcggcaaccagaatattccatgtagatgaatatggtgtggtccttcttgatgcggtgggaaaaggacttccgaaactggtccatttccggtttgtgggaattgatctgagacaggctttgggaagaagtttgatgatcgcggcagttgtaatggcggagacacttttgtcagagaataatttcgcaatgaagaacggatataagatcgatgagaatcaggaaatccttgcctgcgcgatgggaaatatcgcggcggcatgtgtagggtgctgtccggtgaacggaagtatatccagaacatctatgaatgagcagtatgaaggaaagacacaggcagtgtctgttgtggcagcaattacaatggccttggttcttcttggcgcaaccgggtttatcggctatctgccggttccggtccttacagccattgtaatttctgcactgatgaatgtagtagaactgcatctggcagtacgcctgttcagagtgagccgtaatgaattttatatctttgtggcggcatgtgtaagcgtgctggtttttggaactatctatggtgtggtaatcggacttttgctgtcctttgtggcggtagtgcttcgagcgacaaatccaccgagatcattccggggaatgattcccggaaaagaagcctattatgatctgaagagaaaccgcaatgcatatccgatccggcatacagtgatataccgtttcagcgagaatctgttctttgcaaatataaaagtcttccagacagatattgagaacagtattaaggaagatactaaggttgtgatcgtagatgcggcagcaatcaacagcattgatattacggcggcagatcgcctggagatgatggcagagaattttgaaaggaaaggaataaagttctacattacagaacattccgaaaatgtgaatgaacagatgagaaaacttgggatcgggcatctgattgaagaaggaaaggttagaagaacgattcttgcagcgctacaggatgctggtattccgtcaatgggaacaaccgccggtgcagataaagcgcggaactctttggtctggatgccttggcagctggagataccggcggctgttcatgcggtacatgaggcgatggttccggcagaagaggaaaatacgctggaagaatttgcctgggcatttggagatgatgcggttgaagaaatggagaagaaagtacaccaggtcatggaacagattcacaaacttccggatctggaaagacttgcagacgtagggttcgaagagaaactcaaaaactggcatgcgctgggcgttttggatgaagatgagattttaagacgaatggaaatgcatttggatgaacttccggagaatttaagaggagacagaaaagtgatccttcagttgattgaaaagagaagacgaaagatcgaacaacagctgttattacatcatccggaaattgtagaatatttgaagaagagccgggaaagactggaaaagcgcctggaaaaacagaatccggaggcagccagaaaactgcatgagtgggaagtgcagatcagggagaaggaagaggagtaacagtagaaaaaagtaatcattgattgaaaaatgtgttgacataaatgatttacagtggtacagtgatagtgttgtaaaagataattaaatagatagacatagagaatttgccaatggcaacttttcttgcatactttgggatatagaaagcgaagaggcttacaggatagtgagtcacttcgcttttttgatcccatgcattcgcaaggagctgttgatggcaggttctcggtatgttatacatatgaaaaatgacaaaatgtgatcttttacaggatagtatcagatatatggaagaagggatgagacaatgtcacatttggtaattacaattggatgcgaatatggagcaaagggaaatcagattggaaggaaaatagcagaagacctgggatttcagttttatgacagaaatatagtagatgcaattattcatgaagttggaatccccggagaaatcatggaaaaggtcgaagaaggcgtaacaattgttggaaaaggtgcggaaggagaggaacgaggagagttttcacaatacgcagatcttacaaaacgtgcgattcatgtacagaaaacgattatccgcaagttgtcggacagagaatcctgtgtgattatcggtcgttccgcagattatattctaaaagaacataagccgattttaagagtctttatctattcgccggatgaagtaaggataaaaaatgtaatggaaagtcataaggtttcagagaaagaagcaaaacagattattcttgaaacggataaaaggtaccataagcgtcacatggcattaaccggaagtaaccgaggagaccgacataacagagatatcttaattgacagtagtctgctgggagtagatggaacagcccgattaattgagacacttgcaaaacaagtagaaaaacagtaaggagttgattatatgaataagaaaaaatcagattttgacaaggtattcagtgcctgggacattcttgtgattgcatttggtgcaatgatcggatggggctgggttgtatcgaccggaggatggattgaaaaaggtggtgtcgttggcgcggcacttggatttgcaatcggtggtgttatgatatttttcgtaggtcttacttatgcagagcttacggcggctatgccacagtgtggaggggaacatgtcttcagtcacagggcaatgggtccggttggttcattcgtgtgtacatgggcgatcattcttggatatgtcggtgttacatgttttgaagcatgtgcatttccaacgatcattacatatctgtgtcctggattcttaaagggatacctttatacagtagcagggtttgatatctatgcatcctggctgatcgttgcgatcgtagtagcatttctgatcatggtcattaatattatgggagcgaagacagctgcgatcttacagacaatcttaacggtaattataggtggcgcaggaatcctactgatcattgcatctgtactcaacggaacagttgataatctggacggtcagatatttgccggaacaaccggagtatcgaatgtaaaagctgttcttggtgtagcagtgctttcgccattttatttcatcggatttgacgtaattccgcaggcatcggaagaaatcaatgttccaccgaaaaagatcggaaaaatgctgattctttcggtcatcctcgccgttatattttattcgttcgttattctggctgtaggtatggttctggattccggagcaattgcagcatcacagaaaggaaccggacttgtaacagccgatgcgatggctgtggcattccgtacatctgttatggcaaaggtaattattgttggaggaatgtgtggaattattacatcatggaattcgtttatgatcggaggatcacgtgcaatgtattccatggcagagtcttatatgataccaaaaatgttttcaaaactgcatccaaaacataagacaccgatcaatgcactgatactgatcggagtgcttacgatgctggctccatttgcaggaagagttatgatggtttggatctgtgatgcaggaaactttggctgctgtatggcctactgcatggtatctttatcatttttaatcctgagaaaaaaagaaccggatatgccaagaccgtataaagtaaagcattacaaatttgtaggaactatggcggttctgatgtctggattcatggtgtgtatgtactgcattccgggatccggcggtaacttaatcctccctgaatggggaatggttgtggcatggagtctgcttggagtagtattctatgcaatttgtaagagtaaatataaagaggactttggaagtcttgtagagcttatttccgatgaagattctgctacgcttatgccggaggcagatgaggagaaattggatgaggtaattgatcatgcgatagatgtagtacttggtgtttaattcatcactttggatacccgaatctacataaaaagcaaccagatctttctgtgtaactccagccatgactgcgaatgcacagaaagacctggttgctttttattctgtgtgtatcgaatgcgtaagatatgacgaatgaaacggaggacgtaaccgtgagtacttaccataaacaccgataaacagaatataacagttgacaacagttctgcactgttatatactgttaacaacggaggaataacgttatgaacataatcatcaaccactcatccatgcagcccatctatgaacagatcatgggacagattaaagaaagaatcatgcatggggaattgaaggaagatacagcacttccttctgtacgtacatttgcaaaggaattgaaagtcagtgcactgacggtcaagaaagcctatgatggactggaagaagaaggattcattgttacagttcatgggaaaggcagcttcgttgcctgtgcgaaccaggagacgatgctggaagaaaagaaaagagaagtcgaagctgatttggagatggccatccggaaaggcagaagctgtggcatgagtgatcaggagatcagggaattgtttcagattgttttggaggattaaaaggatggtaaaacttgaaaaggtaaaaaagcagtataaggattttgaactggattgttctatggagattaaggagggctggattactggtctggtcggacagaacggagctggaaagagcactgcatttaaagcaatgcttgggcttatcagaagtgattccggaaaaatagaaattctgggaaaaactccggaattactgggaaaagaagaacgggaacagattggggtggtaatggcaggaagtggatttaacggatatttgtcaatcaatgacctgatcccgatatttgatgcaatgtatcaaaaatttgataaggcatggttcctgaaagagtgtgaaaagtttaaattaccgcttaagaaaaaaatcaaagaattttcaactggtatgaacagaaaattacagattcttgcagcactttcacatgatgcgaaactattgatcctggatgaaccgacggcgggactggacgttgtggcaagggaacagattctcaatatgttaagggaatatatggagatgccgggcagaagtattctgatcagttcacatatttccagtgacttggaaggattttgcgatgacctgtatatgattgataatggaaagattgttctgcatgaagaaacagaccgtctactggaagaatatggtgttttgaaagtatccaaagaacagtatcaggaattggatcatacgtatattttgaaaaagcataaagatacatttggatacagatgtcttacggaccagaaacagttttatcaggaaaattatccgggaatagtaatcgaaaaagggaacattgatgagctgataaccattatgattcagggggaaaagatatgaaaggattattgataaaagattttcgcttgttaaaaggtcaggtacattttctgttaatagtaacggtgtgtgtgattgtttttatgataaatggaaacgaagcgtttggcgtggcttatgtatgttccatggtggcattactttcacttacaacagtcagttatgatgaatatgaaaatggttctgcatttttatttaccttaccgattacaaagaaagattatgtaaaagaaaaatatctctttgctggaattttgcttctgatcggtttgatagtatccatgatcatgtggtacattacagctgtgataaaaacagggaatattgcgtgggatgactggatgagttgttgtatcggtggagttacagcaggattaatgatggttgcagttgcacttccggcacagttaaagtttggaccagaaagaggaagaattgcgttagttacaatagtgttattggctgttgcgttaggaatattgatgcaagaattcacgaaaggaacaaagtttgcacagagtgcaaagcgtatattgaatcagatggataaattgggtaccaaaggaattctgggagttattgtgatcatatgggttatcgttggtgtgatttctatgataatctctatgcgggtgatggagaagagagaattttaatacgtgtgcgcttttgagcataatagaaggtagaattataatgtagaaaaagcctcggagaatcataagtaaataattctccgagactttttttgtatttatatttatattggaaagggttaccctttatgggaaatattttaaagatagtttaatctttcaagggtatttaataccatgtggcgtccggcatctgttccgtcgatgatacgtcttgcgcggacagagtcaccgatgttcagaacttcaacatcttcgccaacgaacgcttcctgaatgtcattccagattggagcgtttgctctcattccgaggcatacgaaaccatagtcaaacggaagttcttcttcttttccgtcgtattttacgaggaaggaatgagcatttaccttctgaagagctgtgttggtcatctgtctgacatgatgtttttccatgcattctttcatgcttgatgtagaagaggcatccaggccgtttccaatgattggcatcatttcgatgatggttgtttcagcaccgcgtggagcaaaaaattcaacaacgtcaagtcctacagcaccaccaccgacaactacgactttcttgcctgtcatgtcttccggatagttctttaagttggcaatcatatccttgatagaataaacgctggcatctttttttccaaggttgtcatgcagtccttcaatcggtggaagaagcggtacagaaccagttgagtttacaacaaggtcgggtttgtgttttttgatctcagcaacagttgcatcgactcccgttttgattgtcagattagaaagttttgatgcacggtgtttcaggtaggctgggaaatcagcaagtctcttctttgcaggaatctttgaaatctcaacagacagaccaccaacttctttttctttctctaataatgtaacgttgcatccgacttctgcagcagtgcatgcggcctcaagtcctgcagttccggcaccgacaactacaacgttgcatggtttgtttactttctgtttcttataagcttctccgttgatcagatccgggttgattgtacaacgaagtggtttgttaccgccgatacggttaccaacacatcctacattacaagagatacatttgcggatatcacatacatcgccatactgtgctttattacaccagtccgggtcagcaatcaggccacgtcccataccgatcaggtcagcgtcgcctcttgcaaggatatcatcggcaatcttaggatcccggatatttccgatagcgatcgttggctttccaaatttatcgcgaacggcttttgccatgtatgaacgccatccgtcttccagatagttggcatcgatctgatactggatagaagcattcagtcctgctgaagtatcgtagatatcaacttcatcattcagatattcgagatattccagacaatcttctaccgtattaccgccttcgacaagctcatctacactaagacgtaaagaaataggaactctaggtccgacagccttacgaacttcgtcaattaccatacggcagaaacgggcacggtttttggcagagcctccaaattcatctgtacggtcattggtggtaggagataagaactggctgatcaggtaagagtgtccggcgtggatctctacaacatcgaatccggcattgacagctctctttgcagctgttccataatcttttgcaatactttcaatctcttctttagaaagtccgcgaggaatctctccaccggctttggatggaaaacgagaagcggataccggctgcatgccgattcttgaactcattgcagaagcaccggcatggttaatctgaattcccatcaaagccccctgtctgtgacaggcttccgttaatgtaaaaaggcgtggaatgtagcagtccttgtcaagacgaagctgtgtagttccgttcgatccttccggatattttacacagacgttctcaaccatgataagccctgtgccgccacgtgcacgcagctcataatatttgatatgttcatcgctcagttccccatcatgtccggcgaagtcacttcccataggcatcattacaacacggtttttaagtgtcatacctctgactgtcagagggctgaatacgtgtggaaaattgtttttcatagtttattatcctccattaaaatctgattgtatttgagttacttctctctatacctcgattatatgattttgttaaataaaagacaaattcaagtttctgtaaaagttgatagattttgtctatggattttccgatgcttgatttcttctgcaatggctgccaacgtcagcagataataattatcattggacgttttattttttaccagcgtctgtcttcccgtaccgcagacataatactttccttgatattgcagaacattctgcatggtatacggctcgtaatcatacccaataattccacttgggaaagacacttgtcttgttttaatggcataatagccatgatcaattcctatgattatcgcaatcacatcctttcattttttctgtttaacgtaaggtcaaaaatgttgtcactgctgcaacggatcgttgcaaaagtgccattcgtgaacacttttctatgttccagcgtcccaaaacctgcggaaaatctggtttttttataccactatcgccagaggaacactactgttccttcccagccggttataaaagatccctctcccggcggcggtccagcctgtccgggggagggatatatcgcaagtttcctttttgaacaattgcctgtctttttatttttatgagatgtttttcctgcttttgtaaaatgggaagatactccggttctgtcaaaaacttccgtatataattgcccttttttcccagcttgttatcatttttcagcagttctatttctaccatgtaatgggtatctggatgaaatctcttctcacacaaaatgctgtccccttttatataatcagatttaaatctgattatataaaaggggacagcattttgtgtgagaagagatttcatccagatacccattacatggtagaaatagagatgttaaaaacagataacacgctgggtaaaaaaggagcttatatccggaaatttttgacggaagatgagtattcctccatgctacaaaagcaggaaaaacatctcataaaaataaaaagacaggcaattgttcaaaaaggaaacttgcgatatatccctcccccggacaggctggaccgccgccgggagagggatattttataaccggctgggaaggaacagtagtgttcctctggcgatagtggtataaaaaagccagattttccgcaggttttgggacgctggaacatggaaaagtgttcacgaatggcacttttgcaacgatccgttgcagcagtgaaagcattcttgaccttacgttaaacagaaaaatgaaagggtgtgattgtgataatcataggaattgatcatggctattatgcaataaaaacaagacaagtgtctttcccaagtggaattatcaggtatgattacgagccgtataccatgcagaatgttctgcagtatcagggaaagtattacgtctgtggtacagggagacagacactggtaaaaaataaaacgtccaatgataattattatctgctgacgttggcagccattgcagaagaaatcaagcatcggaaggcagttatgcttccggcagcttatatggttctgtcggaaagacatggagaacgctggtgctgacgaccggagattccaagcaggatatcggtgtatttgaaagcgaaacagcagctccggtaagtttcagtgtacagtggctgaatatgacacgcattgagttgacgaagaaagatatcaatacacagaacccactatctggagcagtttacggtatttacaccgataagaagtgcgaaaatctgctaatgacgatgactgcaaccggaacagatggaaaagcagtcagcgattattttgattcagcactgaaaactgtgtatgtaaaagaagttactgccccgacaggatacaaccatccggatgcacgatgtcctcttttgcatacagaccatagactgcaccacgaagagtactgtcaccctgtgctttaaatgcaagtgtttctttatcgatctttgcgatttttacttttcctgtgactctctcatcggttgcagttacagacaatgtctttccggctgcaacatccactttatatacttctgtattcagtttgtatcctgtcggggcagtaacttcttttacatacacagttttcagtgctgaatcaaaataatcgctgactgcttttccccagaaaacaggctgccaccggaataataccgcattacatggggaacgtattcgggatctccgtaactgctccatccatgtgaagctgcctgctcctgtgaaaattgtaaagcattggcttctgtgtatccgcctctttgcaatgcccatcctatgtatccaaatttcatggtcagaaaacccgctattcatggccattataaggcggaagaagaaaaggcatggtacaataactataaagatttcatgtgaaaataagatggagaccgataaaatgaatggatggacaaaaaagagaaaagtagatacttttatggggattttattgcaagtgtactgtttcttcccgtggatgcacataaatagaaaatggaatacgattcacatgtatgtaattaagacctttcaggaaaatgattacatcaagatgtataatcatacatttttaaaacagcatatgtggaaatggaaacattcacaggtagttgcgtttatatttttactgatgttaatattcctgattttgcttcagagtatagaattgtatgaattataccagtgcataaaaaacgggaatcaatcaacaaattatcatgtatttgtttggattacttatcttgcagcattttacatctttatggctatagcatctaccggatttgtagaattttattctatgccgatgttttgttatatgatgctgtttctggctgtcataggaatctggatatttcttgatattcaggcagaagcatgggacgttgagacagaacagcacagagctgaactggaagagcaggataagaagatgctccagatgaaagtaaaggcgatggaagaacaatatagggaaatgttaaagagccggaagattgttcatgatatgaagaatcatttgcttgcattaaagaaatatacgcaggaacaggactggaagggattggaagaatatctgaacgaactcagccgggacatgttggattacaattaccagatctggacaggaaaccatatgctggatatgattcttaaccagaaagagaaggaggcagagaagcaaaagacgcagatgcagatcagcacggaagtattcacaacgcttccgttttctgacagagagatcatttcactttttggaaatcttttggacaatgcgttggaagcgtgtgagcagatcaaagaaggagaacgctggatacatataaaaatgaaaaagaagaatcagctcttatacatcgagattgtaaatgcggctaaaaatacgggaatacagacagatgaaaattttgtatcaaaaaaaaaggatggagtgttacatggttatggaatgaaaaatatccgggatattgtagaacaatacaatggaatgtttcagtgtaaaagccaggaggatcggtttgaggttgtgattactatttacggataggaggcaggtgaatatgaaagaaacaaagaaaagaagatatattgtatcgacaattatgtacggtatgattttgatttttattcagcttccgtgggtagttttgaaagggaaaaattacagtatatatgcagcatatttccgaatcaaagcaaaaggaataaaagcactttcggagatggcagcgtctgtctgggatgggaatcttacgataatccggatacagttaatactgtttattgtatttcagatcgtgattgtattacatatagtgacgcagtggctgcataaggaatattatctgaatatcgctgcgttagttgttctaggtgtatatattgtggtgaatgaatccggatttggaatgcttgcggataattcaacaaaaacgattctgattcctgcaatcatcatgatatttgttatggcagaagtgctgatcagaaaaatgcttgatgtatggaaagatgccaaggaatcagcagaaatatttgcggaaaaggaacgggaagaaaaagaagaagagcgcaggagattatattttccgggaaattataccaaacttttttatcagatggtctggcacaattttaaatatgactggaaagattacggcctcttgctgttctgtggtgtaatcgtttctgcattctcctttgcaggacttggaatatatcagatgatggcgaaagctcaccgggcagagaatttcctgctgggtgaaggacttggaaggatattgctgaatgcaatgcttccgatggcggtatgtgccatctttttgatggtgtttgttctcgtattttacatgaaaaaatggacgcagaattacagtgtattcgtgacgctgggaattcgaaaaaaagcgttgtatacgattattgggatagagatcgcagtcgcttttttgtgttcgctgattgccggcggtctattgggaaatatgatcatgtttctgttccggaaagtgattttctcaatgctggcaaaaggaattgttctgtcaaaggtgacgtggcttacttatgtgaaaggtacgttggtggtgttggcagtgtatataattgcattgatggcgaccagggatatcgtatcggatttcaatctggtcagggcatcgatcagaaacattgcaaaagaacctatgccgcagaggaggacaaagttattcataacagccggaatcataatctgtatgatcgctatattcgaataccggcagttgagaaatcatgaaagtatgtatctgctctttgcattctttgcaggtatatttttactgattcgttttgtaggagccggatatttgagacgtgcaaaaaagacaccggcatatctgccacagatgctgaaccggaatcatttgtattataaatcaaagacaactgcaaggtatgtgctggcacttacaatattgaacgtatgcgcagtgttttactttctgtttcaggtagtttcggtaacgattgcagagaagccggaaagtctgtatccgtatgattttgtctgtattgcagatgatggagatgatgcgatttttgataggataaagaacggttatcaggcaaaaatcatagaatatccgatggtgcgtgtggcaaatgcagataagacagaacaaaacgaaggcgtgcaacaaggaaaaagaccgcagggacaacagatcgggatttctgaatcgacatacaaacaattgaaaaaatatgtagatccatcgtataaggaagaagcaatgcatcttgatcgaaatggaaagaaggtatatctggtgcaccaacaggatcgctccgtgaaggcacagccggtggattggacatttggaaagaagaaaccatttttgcatatcggtcttccgtgtgaatattataccttatattcgccaagcaaagcatatccgaaaagaacaatagaaggggaagaaattggaagtctgattggatgcttccgtcagggaaaactggaaaatatcgttgtattctcggatgcatatttcaagaaagcacagggaatgtggaaatacacgaacatattaaccggagacaagatagaagaaaaggccttgcgaatagatggtgtcacaattaagcagggtccgacgaagcttgtactgatccaggcagacccaaaataccagaaagcaattgaaaagaaaatgaaaaagctggaaaagaatcatacatatgaagcgcagtacgatttcgaagtacattgctggtattcaaaaaagacggcagtcaatgatctgaagacagaatatacgatgaaactgatcataaatacattcgtattgcttacaatgaccatctccggccttttcctgatgtatattaaatcgttatcagaaatgagtgataagaaagcaagagctgactttttgaaatgtatgggaatgcgaaagaaagaacgagtatcactcctgaaaagagaactgtattacttttactggctgccggagctgataacgatagtcgtgaccagtatctttacagcagcaacgtttcatgctcggatgtatacgcatgccgtcagaattgcatggctgaaacatgctgtctggatatggcttatgtatctggcagtacagtggggatttgcatggatattaggaagatttattattcgaaaggtggaaggaaaagatgaataaacgggaagttatgaaagtggagaaccttgttcggaattataaaatggtctattctgacagacagggtgaagaagaaattaaagttttaaaagggctggattttaccattgaagaacaggaatttgtcgggatcatgggaaaatcaggctgcggtaagacaacacttttaaaagtgcttggcttgatcgacaaaccgacttccgggaagattttctttacgggaaaggatgcgtcagaattatggagtgatgaactggcggatatacgaagaagagagattggatttgtgtttcaggatttttatctgttaaatagtctgtctgtaaaggagaacatcatgctgccgatggtgttggacaaggcaccggttgataagtgttataagaatgtagaagcatatgccgaaaactttggtttatcacaccttctcgagaagcagccatatgaagtgtccggcggagaaaaacagagagttgcaatctgtcgtgcgctgatcaataatccagatctgatcctcgcggatgagccgaccggaaacctcgattccaagtccggaaagattgtgattgatgcattgaaggacattaatgaacatatgggaaagacgattattatggtcacacatgatccgcagatggcaagctattgcagccggttgatcctgttgaaagatggtgtgatactggaagatctgaagaacagtggggatcaggaggcattttatcaggagattcttgagaaaatgaaagagttgtaaaagattcacaaaaattgagcatttctaaattacatattgaaaacagaaatagtatatcaggaaaagttattgaaagaatttgaaatttaacaatatcaaaataaagaatatgtaccagactagccattatcggaaacacggatacttttctgagcgtagtatcttgacatatagcatatcttggattacaattcatttaacgattaggctaaatgttaaatgaaaggtcgtgatgaatttttgggtatacaagatacattaaaagcactggctgatccaatacgacgtgagattttgaacctgttgaaaaaagggcggctttcagccggagaaatatgtgagcatttttcggtaacgggagcatctatatcaagacatctggcaatattgagggaagctgatttgattcgaaatcaaagagaaggaaagtttatttattatgaattaaacacttccgtactggaagatgtcatgttgtggataacagacttgaaaggagcagcggacgatgaaggaaatgataagaaaatatagaggtacattaattagctctgcattggtaattcttgcaggagtcctggtgggttttacgagtatacaaggtaagtggataaatctattttttgtagtgatgcaatgtgtgtttgttgcaatcatattttatgataacaggaacagacaacagaatcgcaaggttatagggatgactatatggatcatacctgttattacattgctttataatggtattgtcagattggttgatatgggagcagatatagagaatttatttatggcattcatttattatgggacaggtttaatgttcatggttataggaaattatctgccaaaggtaaaacagaacaatacgataggaatcagggtcgtatggacattgcaggatgaagaaaattggagtgcaacgcatagattcagtgggaaaatatgggtggcatcaggtattctgtgcatgctttgcggtctttttgcagaaagcatagctgcacttgttttgtatgttgtaagcattatggcagcagtaatcatcagtgttctttattcctatttcttttataagaaaaagatagaaaccggagaaaaattaaaaattcaatataaaaaaaaggcaattgtgagatacggaatcgtaacaattttaactattatattcattataggaagtttgttttggggaagtattgatattcagttccaagataacagttttactatcaaggctcagggatggagtgattataccgtagactatacgaagattgacagtatctcgtatgaagaaaatttatttcagaactcgaatgattataggaccaatggattagggaattttaaatatgctatgggaaattttagaaatgatgtttatggaaattatatccgttatacgcattcatcctgtcattcatatgtagtgatgagcataggtggaaaaatcttagttgtaaatggtgaaaatgatcaggagacaaaggaaatctatcataatatcagcgagaaaaaataaaattactaagacttcccatacctaaaaagggatttatttatatttgccccattcactgattcatgctaaaataaacaaatatggtaagacgaaaatatcttattatcataatcaatgaatcaaggagtaacaatgagaagattagcattaactgatgatatattaatgaagattgaaaagcctgcccgttatatcggaaatgaggtgaattcagttatgaaagacgcgtcctgtgcggtcacgtggcgttttaaaattgcggagcctccacccataaatacggttggtactgcccggagatcaaacccggattctgtcaccgcagacagtattctttctatatatttccgtccgttttcctgtatgatccgtctggcctcttctgccatactgcaagattctccccgaagcacacgctcaatttgagtttctgtcacagacagtccggtatttctacgcacttgttctgctgtctcatcaatacatcggattactccaagttccagacttctgcacgttgctgcattcggaacagcattgtccagcctcataaggtcaacggtccagccaccaatatcaacaagcagaacagacggttcattcttcagtgaattgatatttattttaacatcaatccaagaggatatatagctcttttagagtttacacagaattaattacagtctccttttttacaaaaaaggaactttccaattaaaaatcttaaatatggttatcaaaaaaggcaaaaggaagctgccgcttcaccgatttttcaatcgttaaagcgacagcccctcactctttatttgctactatattctttacagatcattttacaagattacttttaagccattcttctcctctcactgtttcttccgatattcactcggcagttccccatactgctccttaaacacccttgcaaatgctttgctccccgcaaatccattcttctccgcaatcattccgattgaaagatctgtattcaccagatcattatacgcatgccgaagtctcagatcatccagatacgtcttataactcatctgcgcatactttcggaacatacgtgataaatacgtcggggaataattaaatgtcctcgcaagactctccagcgaaagctctttgctgtaattttgtttcatataatccgtaattgttgacagcttatttaattttttatttgcacatatcttttccgcatccagatccgtcttgcggtacttacttaccaacagatacagcagacggtaatacagactctgaaccttatattcatatccattcttcttctccgcatatacatgatacatttcttcaaacagacccatcacctctggatcctggaactgtgagaaaaatatatgaatccgtcgtctgtataatatctttcgaatgtcgcaaccggtatttgtatgaccagcgttttattctttttgggcgcatagatggaatgcaattcatttgaattcacaagcataaattctcccgggtgaagcggatatctcttgtcattcagataaaattccatctccccatcaaatactgcaaatatttccattgatctgtgccagtgtttctggcggatatatcctcctcgacttccctcaaatatgaacattttaaatgggagatcatcgttgggcacaatgatctcatgtgaatattccatacccttttactccatatcatcatttattcatttcaattctcagagtccatcattcagccatgcagtcgctccgatatgctgaaccgcctctgcgccataacggttgccctctttcgcacatcttttcacaccgtttccatccaacagtgcattcagaaatcccgccgcaaagctgtctccggctccagttgtatcaatacaatttacattctcttccgcagctatccaacacttttccacatctgtccgaatgtaacatccccgctttccacattttatgatcacatttcccacacctgtggattttatgcattctgctgcttcttcgactgattccgtttccgtcagaagcatcgcctcttcatcatttggaaacagataatcaatatacgaaaaagcttccgccatatcttccagcgtctcgccctttttacgctttgtcatatccgcacagacaattttcccctgcatttttgcctgtgagaatatttgcactaatttatcaggaccaatcttcggaaatacaaatatgcttgcaaagcatacgatctttgcactctcaggaaatggcatctggatatgttctactttcaggcttcgaagtgtaccatgcggattcgtcaagaaacttcttgttccatcttgctccacaagaacaatattcatacctgtcttttcatcttttttgatgcacgcatcccgtaccatgatccctgcatcattgcaatgagcctgtatgaattttcctgcatcatcctgacctatcactgtttccaactgaactctccgcccttttttggcaagtatagtggcttcatttaatgcatctgcccctgtcgtcatatgtatatcttctgtcgaatacgatcccgtttcaaatactttcacgtttacaggatatgccagaacatcaataattgctgctcctataattactatttccggattttgcatactgctctcctcttaatttaattttattttatatttttaagtatacataactgaattattttcttcaagattattatatccatctgtcgaactttcgctgatcgtttctttcttaagcccaacaagttctcttgtatactttggtataacaaaaaccccagaggttttagcctctggggtatatatttgagttaatattctgataacagattataattactcgatgattgtagcaacacgtcctgatcctacagtacgtccaccttcacggatagcgaaacgaagtccctgctccatagcaactgggtgaatcagttcgattgtcatttctacgttgtcaccaggcatgcacatttcaacaccttctggaagttcgcaaacacctgtaacgtctgttgttctgaagtagaactgtggacgatagttgttgaagaatggagtatgacgtccaccttcatcttttgtcagaacgtaaacctgagctgtgaatttgtgatggcatgttactgaacctggtttacaaagaacctgtcctctttcgatttctgttctctggataccacgaagaagagcaccgatgttgtcaccagcctgagcttcatcaagaagtttacggaacatttcaacacctgttacaactgtcttcttagtctcttcgtgaataccaacgatttctacttcgtcagatacatgaagaacaccacgctctactctacctgtagcaactgtaccacgtcctgtgatagagaatacgtcctctactggcataaggaatggcttatctgtatcacgctctggatctgggatataagaatctacagcatccatgagttccatgatcttgtctccccactctgagttaggatcttcaagagctttaagagctgatccctggatgattggagtatcatctcctgggaattcatactcgtcaaggagttcacggatttccatttctactaattcaagaagttcgtcatcgtcaaccatatcacatttgttcatgaatacaacgatgtaaggaacacctacctgacgagaaagcaggatgtgctctcttgtctgagccataacaccatcagtagcagctacaacaaggatagctccatccatctgagcagctcctgtgatcatgttctttacgtagtcagcatgtcctgggcagtcaacgtgtgcatagtgacgtttctctgtctggtactcaacgtgagctgtagaaattgtgataccacgttctctctcttctggagctttatcgatatcttcaaagttctctgctgtgtttcctggtactcttgctgcaagtgtctttgtgatagcagctgtaagagttgttttaccgtggtcaacgtgaccgatagtaccgatattacaatgcggttttgttctttcaaatttagctttagccattttgaatatcctccttaatttagtgccatatggcatattaacaaattgttcgtttgctcggctacatttgattatatttcaaatgtagcactttttcaagcattttataaataattagtcatttttgctggataaaatcttttcctgtactgacttcggtactggctcgtatttctcgaagaacattgagtagttaccacgtccctgtgttctggaacgtaagtctgtagagtatccaaacatttctgacaatggaacgaatccacgaacgatctttccgccgccgagatcatccataccttcgatacgtccacgacgtgagttaatgtctccaataacgtcacccatgtactcttccggcatagtaacttctactctcatgataggctcaagaagaactggagatgccttcttcatagcgtccttaaatgcaagagaacctgcaatatggaaagccatttcacttgaatcgacttcatggtaagatccgtcatatacgttagccttaagacctacaactgggaatcctccaaggataccagactgcatagcctcttcgataccttcacctacagctgggatgtattccttcggaatagctccaccaactacagtagattcgaatttgaatgtttcctcaccattaacatccattggctcaaatttaactttacagtgtccgtactgtccacgtccacctgactgtttagcatatttgctatcaatgtcaactggttttgtaaatgcttctttgtaagcaacctgaggagcacctacgttagcttctaccttgaattcacgaagaagtctgtctacgatgatttcaagatggagctctcccattccggcgatgattgtctgtccagtttcctgatcagtatgagcacggaatgtagggtcttcttcagccagttttgcaagagattcaccaagtttaccctgggaagcttttgtcttaggctcgatagcaagctcgataactggttctgggaattccattgattccagaattacaggatgctgctcgtcacagattgtgtcacctgttgaagtgaacttgaatccgattgctgctgcgatatctcctgaatatactttatcaagctcctcacgcttgttggcatgcatctgaaggatacgtccaacacgctcttttttattctttgtagcattcagtacataagaacctgagttcattgtaccagagtaaactctgaagtatgccagcttaccaacgaatgggtctgtcataatcttgaatgcaagtgctgagaatggctcttcgtctgaagaatgtcttacaacatcgtttccatcctcatccacaccttcgattggtgggatatctgttggtgcaggcatgtactcaacgattgcatcaaggagcttctgtacacctttgtttctgtaagctgatccacagcaaacaggaactgctgtacactcgcaagttgcttttctgagtgctttcttcatatcatcgatagatggttcttcaccttcgagatactgcatcatcagatcatcatcaagatcgcagatcttttctaccatttctgtatggtaaagttctgcgtcgtctgccatatcttccgggatatctgtaactgtgatgtcatctcccttatcatcgttgtagatgtaagctttcatttccatcaggtcaatgattcccttgaagtcgtcttctttaccgattggtaactgaagacaaatagcgttctttccaagtctggtcttaatctggtctactgcattgtagaaatcagcacccaggatatccatcttattgatgaatgccattcttggtacattgtatgtgtcagcctgacgccatacgttttctgactgaggctcaacaccacccttagcacagaagacgccgacagcgccgtcaagtacacggagtgaacgctcaacctctacggtaaagtcaacgtgtcccggagtatcaatgatgttgatacggtgctcaagagctccctttttcggttttgtgaactcttcaagtgtccagtggcatgttgtagccgcagaagtaattgtgatacctctttcctgctcctgttccatccagtccatggtagcagtaccttcgtgagtatctccaatcttatagttaacaccggtatagtacaggatacgctcggtaagagttgtcttaccagcatcgatatgcgccataataccgatatttcttgttctctctaatggatattctcttccagccaagattttttcctcctataattagaaacgataatgagcaaatgctttgtttgcttctgccatcttgtgcatgtcttctttcttctttacagatgcgcctgtgttatttgctgcatccaggatttcgttagccagtctttcttccattgtcttctctcctctagcacgagagtatactgtcagccaacgaagtgcaagagtctgtcttctttcaggtctaacctcgattggtacctggtagttagctcctccgatacgtctagcctttacctcaagtactggcatgatgttattcatagcctcttcaaatacttcgatagctggcttttcggcttttgcttcaactctttcaaacgctccgtatacgatcttctgtgcaacacccttcttaccatcaagcataatgttgttgacaagcttggttaccactttattgttgtatactggatccgctaatacgtctcttttctgagtatgtcctttacgtggcacggtccttccctccttaaacatcttaatttaattcatcggtactcacatgtgtctttctaatgatactgtgtagtgcatagggcatacaatatatataccttgcaacttacataatcatagttctgtttgtgattacatttttaattggttcgaaatcttatctatgctttacgcaacagatttatttcttatcttttggtctcttagcgccgtatttagaacgagcctgtcttctcttagcaacacctgctgtatcaagtgttcctcttacgatatgatatcttgtacctggaaggtcttttactcttcctccacggatcaaaacaacgctatgctcctgaaggttgtgtccttctcctgggatgtagcttgttacttcgattccgttagacagacgtactctggcgatctttctaagagctgagttaggtttcttaggtgtagcagtcttaacagctgtacaaacacctctcttctgtggagcagaagtatcagtgcttctcttctttaaagagttgtatcctttctgaagtgccggtgctgtagacttctttacagatgtctgacgtcctttttttactaactggttaaatgttggcatttctttcacctcctacgattataataagttgcttattcatcttgtgaatagtcgtacatcaaaacaaaacgttcctatgcacgcttgtttagtttattacgaatcatgatacttgtcaagggatttcccttgattttttcatgttttctgccacttttttcttagtttttacaagattttttcttttccttatattttacgatttcatgctttatcaagctaaatactaatactcccgccaatacaccggcactatcgatgcatacatctctgaactggcagctcctgcccggcacaaacaactgatgtaattcgtcacttgccgcatatgctgtacctgcacaccagcagatcagcatggaccgtttcccgctgtcttccgaaaaagaatacgccgtccccagtatcagcacaccaaggaccgcgtactctgttgcatgcgcacatttgcgtaccgggaaatcaatcattttcgcaaactgctcctgccgttcttctgaccaggatgtaaattgcgggactatcagcctcccgatctcttttcctaccgaatggctcattccctccgattctaccgcttttttagccgaaaaagaaaaaatcactgacatccagatgatcataaagatcagccagattattcctgtcttttttctcttcatcctgttttctgtcatattttttcctgtctttttgattctttactatgtctcggatatctgactccggattttatgcctgcagatctgagaacagatcttttcgatatacgccatctgcgatcaattttgcaaatgactctactacaacaggtttatcttctttataagtaacaccaaaccatttatcctgtgtctccagaagtttgacacttacttttccttttttcaaaagctcgtcaatatagattggaagcaggtattctcctttcagtttttttgcttcgtctcccttgatattttcaaagaattctacaaagccttcttccaaaagtcccacaaattccggtgtcaatccccacatattcatagatacatgcgaattcacatttattttatttccctgtgattctgctccgtcctctgtttttttgatttcataggtttccataacatccgtcagataatcattctcatccactgcacagattcctcttgtaacagttccattatcacttaaagtattaccaagaataaaacctgccatgcagagttctttcgatctttccggagtataattattaatcagaaattcatggatctttacaaatgcttcttttccataataatcatctgcattgataacaacaaacggttctttgatgatgtctttacacaccagaactgcctgtcccgttccccatggtttacttctatccacaggttttttgattccttccggaagatcatctaattcctgataagcgtaagcgaattctacgttcaacctattacagattccttcgatacgctttccgatcgcgtcatgaaatgcttccttaatatccttacggatgataaatacaactttattaaatccggtttcaattgcatcatggatagaataatccataataatctctccattcgggccaaccggttctaactgcttgattccaccaccgaaacgagaccccattcccgcagccatgatgactaatgctgttttcatagtcttctttctcctttattcatttgtctttttcacggttaggattagtatagcacaatttcgggacctattctactgttacactcttcgcaaggtttctcggcttatctacatcaagcccttttgccacagatacataatatccaagtaactggagcggaatcactgcaagtgatgttgcaaagtgtggatctgtctttggaatatatacagagaaatctgcattttcttcaatattatagtgtccaaatgtcgtaagacccatcagatatgcgccacggctcttacactctaccatgttactcagtgtcttttcatataatgccggctgagtcagtactccgataacgagtgtaccgtcttcaatcagagaaatcgttccatgttttaattctcctgctgcatatgcttcagaatgaatataactgatttctttcatcttaagacttccctctaatgaaattgcataatcaattccacgtccgataaagaaaatgtcttttgcattcacctgtttggatgcaaaccactgaagtctttctttgtcttcaatgattctgctgatcttatccggaatcgtcttcagttcttcgatatatccagtatactgttcctctgtaatctgacctctgatcttagcaaactgaattgccagtgtgtaagttgcgatcagctgtgtactgtacgcttttgttgttgcaaccgcaatctccggtcctgcaagtgtatagaatacattatctgcttctctcgcaatagatgagccgatcacgttcacaattccaagtgtctttacaccctgtttcttagattctctgagggctgcaagactgtcggcagtctctcctgactgactgatgataataaccagtcccttaggatcgaggatcggattacgatatctgaactctgatgcaagttctacacgtaccgggattcttgccaggtcttccataacatactgtgctgccactccgacatgatatgcagatccacacgctacaatatagatctggctgatctctttaatctcttcttctgaaagtccgacttctgaaagatcgatcgcaccgtcttttacaacagatttcagagtatctgaaacagccttcggctgttcatggatctctttgatcataaaatgctcatatccagctttttctgctgcctctgcatcccattcaactgtttttaattctttttcgatctcatcgccatccagattatagaatgtaatctctcctttgcggacacgtgccatctcctggtttccaatataatatacatctcttgtatatttcaggatcgcaggaacatctgaaccgatataagattctccgtttgcaactcctaagatcatcgggctgtcttttcttgctacatagatttcttccggataatcttggaacatcattgcaagtgcatatgatccacggatacgcacaagtgcatgattaattgcatctaccggtgttccttcatattttttataatagtaatctaccagttttactgctacttctgtatctgtctctgagtaaaatgtatatccttttcgtacaagtttatcttttaattcctgataattttcgatgataccattatgaacagctactacatttccgtcatcacttttatgcggatgtgcattgttctcagacggttctccatgagttgcccatctggtatgtccgataccacaagttccttttacagtttctccatcattggtcttctctgctaaaactttcagtcttccttttgccttaataacttctacatctgcatcaccgtcacgtacagcgattcctgcagagtcatatccacgatattccagttttgccaggccatctaacaagatgggtgctgcctgatgttcacctgtaaatcctacaattccacacatattatcttttctccctgtaaaaattcttaatatagtctattcttccagtgtcattcatgtatctttctaacttgcaatatgtcctttagcctttacaacatccacaacctggtctacatattttctacagacttcctctgtctcggcttcaaccattacacgaagaagcggctctgttcctgattcacgcacaagaatacgaccggtatctccaagtgcttctgtaacagcttttactgctgcctgcacatctgcgtcatcctgagcagcctttttatctgtcacacgtacattttcaagaacctgtggataaatggtaagtccatccagcagttcgctcatcttcttctttcttgccatcataacttccatcatcttaagacttgtaaggataccgtctcctgtagaagcgtattttgaaaaaataatatgacctgactgttctccaccaaggatacagccattctttgtcatatattcgtatacatatttgtctccgactgcagtcttcgcataaccgattccagcctcatcaaatgctttgtataatccaaaattagacataaccgttgtaacaactgtattattctccagtttgcctcgctctttcatatattttccataaatgtaaaggatcgcatctccatctaccagatttcctttttcatcaacgcaaagacatctgtctgcatctccgtcataagcgaatccgacatccagaccattctcaaccacgaatttctgcaggccgccaatatgtgtagatcctgcattattattaatattagttccatcaggttctgcattgataacataagtctttgctcccagagcatcaaatacggattttgcgaggttccatgaacttccgttcgcacagtcaagtccgactttcactcccttgaaagaataaagtcccagtgagatcagataaccgatataacgatttcttcctgatacatagtctaccgtacgtccgatcttagatgtatgtgcaaacggaatctcttcataattttccccaaatacttccagcttgccatccagatagtcttctaccagtgcaatcgttccttcatccatcttctctccattaccgttgatcagcttgattccgttatcataatacggattatggcttgccgagatcataataccacagtcaaacccatcggttcttgccacataagctacagacggtgtcgtcgtaacatgaagcaggtaagcatccgctcccgaagctaccagaccgccaaccagtgtatattcaaacatatagcttgaacgtcttgtatcttttccaatcacaatacgagctggtgtatcatcaccgttacgacgctttacttctccgtaataccatccaagaaatcttccgatcttatatgcatgatctgctgttaaattattattggcttctccacggaagccatctgttccgaaatatcttcccatatgtattctcctaaaataaaaatttttagtcattccgttatcaagtaactgccaccattatagttggtatcaagattaagttcaagcaaaagtggcaaaaaagtacgcatatgtgcaaagacatctttcgtacatatgcatactttttactcaacaatcactattctgctttcattccaagttctttttcacacagttccagtgatgatgcaatcactgcatccatgtcataatatttgtattctccaaggcgtcctccaaagatcaccttttcttctttttctgccatttttttatatctggcataaagggcaccattcttttcatcattaaccggataatatggttcatcccccagtttccactccgaactgtattcccggctgattacagtctttggaatgtcatttccttctgaatcttttccaaactcaaaccatttatgctcaataatacgagtccatggtgtctgacggtctgtataattgactgcggcattcccctgataattttcctgatccagaagttctgtctcaaatcttactgatctgtattccagtgttccaagttcatatccgaaatatgcatcgatcggtccggtataaataactttctcggccagcgcatctaacgcctctttattctccagatactctgtattcaggcggacttcgattccatccagaagattttcaaccatctttgtatatcctccgacaggaatcccctgatataacgcattaaaataattattatcaaatgtcagacgcacaggaagtcttttgataataaacgccggaagttccctgcagtcacgtccccactgcttctccgtatatcccttgatcagcttttcgtaaatgtctcttccaaccagggaaattgcctgttcttccagattctccggctcttttgttatctcttttctctgctcttcaatcttcgcttttgcttcctccggagtaactactccccacatcttattaaatgtatacatattaaaaggaagtgaatacaattcacccttataattagccaccggcgaattcgtaaaacggttaaactctgcgaactgtgtaatataattccatacttttttgttatttgtatggaatatatgtgcaccatatttatgtacatggattttttctatctcttccgtatatacatttccggcaatattcgggcgtttatcgatcaccagaacggattttcccgctttcctggcctcatgtgcaaacactgctccgtataatccggaaccaactaccaaatagtcatattttttcatgttcagttcttcctcttcttcatttatattctttcaggtaataggattattctatcatatatcttggttaactgaaagatgctgccctgttttctgccttattttttgtatcatttcgctctttcactttatcacgttaccaaacgattgcatttctttaccgaacatattatactatttaaaaatgaaatagttcaatttgaggtgaaattatgcataaagaatttttaatgggaaatgctgccattgccctcggtgctgttgccgccggcgtcaatgttgtggcaggctatcccggaacaccatctaccgaagtgctcgaaacagttgccaaaaaccgacctgacgatgtctacgtagaatggtccgtgaatgaaaaagccgcaatggaactggctgccggagcagcttatgccggagcccggtcaatggtaactatgaaacaggtcggactaaatgtggcatctgatcctttgatgagcctggaatatgttggaatcaaaggaggaatggtcattcttgtcgcagatgatcctggcccgatctcttctcagaccgagcaggataccaggcatttttccagattttccaaactcccttgctttgatccatcatccgctcaggaagcgtatgagatgatccaggaagctttcgagtattctgaagaatatggtactcctgtgttcttacgaccaaccacaagagtctgtcatggctatgcctccgtcacagtaaaggacgagaaagaatttacgcagcataaacccgaaggattcatcaaagattccaaacgctgggtcatcttcccaagattatctttcatgaatcaccagaagatcgaagcgcgaaacagagaattatcagatgtcttttcttcttatgacaagaataagattcatccgtcctgcgaagcatttaaagattcaaagaaagggattgcaaccggaggaatcagttatacctatgcaatggaaacattaaagaacactggtatggtaaaaaacttaaaagttgcaactcctcatccatttccggaaaaactggccgttgaatttctgactggtctggatgaagttctttgtctggaggaattagatccggtcatcgagcgggaacttacctacatctgtgggaaataccaccttccggtaaaaatacgtggaaaactaagcggagacactgcctgtgccggagaaaataccagagacagcgtaacttcctatattaatacttttctcggcctttccgaccggaaagacgccggacttcctgtagcgccggaacttccggtccgtccgccggtactctgtgccggatgtccgcaccgtgcttctttctacgcggtcaaaaaagctatgaagggaaagaaaactattttctgtggggatattggctgttacacacttggaaatgccatgccgctcgacatggttgatacctgtctgtgtatgggtgccggactgaatattgcacaaggagtagaaaaagttgaacccgatacaacttgtttcgcattcgtcggcgactctaccttttttgcatctgcaatcacaggtgttgttaatgccgtttataatcaggccaatatggtactcattgtactggataactccacaactgccatgaccggtcatcagcctcatcccggaaccggacacactgttatgggagagattgtccaaaaaatcaatatcgaacaggtacttcacggaatcggtgtaacagacgttgaaactgttaatccattagacctgcatacatctgtagaatgcgtacagaagatggcagagcgttccggtgtgaaggcaatcattttcaaatcaccttgcattgcagtcacaaaaccggccgcacctcttcatgtttcctctgacaaatgtatcggctgtaaaaaatgtataaaagaactgggatgcccggctatcgttcttaataacggcaatgtctgtattgacagttcaatgtgtacaggatgcggcctttgcagtcaggtctgcccggtaactgctattacaggaggtgaagatcatgaataatcagaaaaatattgtcctctgtggagttggtggtcagggaactgtcctcgcttccaagctgctcgcagcagcagccatgagtaaagatattccggtcatgagtgccgaaacgatcggtatggcacaacgaggcggaagtgtattcagtcatcttcgtatgggaaataatctgtattctcctatgattgaaacaggaactgctgatcttattataggatttgaacctggtgaaacggtccggatgcttccttacctgaaaaccggtggacacgttgttgtaagcacccgtgcagttaaacctgttactgctactctaagtggttttgactacgatgccccccagatgctcgattacctgaaagcaaatgttccgaatctcacctttgtaaatgctgatcaggcatgcagcgatattggttcctccaaggtactgaatatggtacttttaggagccgccatccgtaccggagtattggattttaccatctctgaaatcgaaagcattatgaagcagacacttccggagaaattccacgagatgaatctccgggcactgaattacaatatataacaatcagatctatcattaaccaactgctcctgcattattgatatataggagcacaccaaaagaaaggcgagggcatacatatgcaaattactgaaacacaaatcgcacaagtcaacaaacagatcaaggcacttctttccgcagaaagtttctatggaaagaaattagaagaagccggcgttaccagcatccagtctgctgaagattttcagaagcttccgttttccgaaaaaaatgatctgagaaatgcttatcctcttggacttatgactgccccggaagaaaaaattgtccgcattcattcatcttccggtacaacaggactgcctgtcatcatcccatatacccagaaagatgttgatgactgggctgtcatgttcaaacgttgttatgaaatggccggtatgacaaatatggaccgcatccagattacaccgggatatggtctctggaccgccggaatcggtttccaggcaggagcagaaagattaggcagcatggttattccaatgggacctggtaacacggacaaacagttacagatgatgatggatatgaaaacaaccgttcttggttctacctcatcttatgctcttcttcttgcagaagaaatccaaaaacgagggattaaagacaagattcatcttaaaaaaggtatcattggttccgaacgctggggtgaaaagatgcggaaacgtattacagaggaacttggtatagaaatctatgatatctatggcctgaccgagatctacggaccaggaattggaatcagttgttcccatgactgcggtatgcactactgggatgattatatttacatcgaaattattgatcccgttacaggcgaagtattacctgacggtgaacttggagagattgtcattactacattagtaaaagagggggctcctcttatccgttaccgtacccacgacctttcccgtatcattcctggagactgcccttgtggaagcaaattccctcgtcttgataccatcatgggacgtacagacgatatgatgaagattaaaggtgtcaacgtattccctgcacagattgaggaaatcctgaaagaatttcctgaggtatccagtgaataccaaatccgtatctctcatctggaaggaaaagataccatgcgtatctatgttgagacaaacggaaccgtagacttcctggatctcgcaaaacgtattgcttctaaagttaaaagccgtattggatttacaccgcttgtaaaagtagtagagatcggcttgttgcctcgaagcgagaaaaagaccaaacgtgtcatcgacgaacgttacgaataataatataatataaaaagaaatacatcattgaagctgattcttcgttttttgaagtaccctgcgaaatgatgtatttctttttatattatattgttttcgtttataaaccaagttcatcggatatagcgcacatttcttccagacctatatcaatcagatcttccagcatcaaacctgtaaactcaatactttccatgtaatctctgttggctccttttgcgaatcttgcttcgttaaaacgctttaatacggattttctttttacacttgcgatctttttatccggataaatctgtgcaaccgcttttaaaaatccactcatcggatctgctgcaagaagtgcatactgaatcttagttttagcttttacaccgctttttggattgtgtgcacaaatggctccgaaaaggatcggatcatcaattccttctttctttaggatttctacagatgtcggtccatgtacgctaagatcatgctgccagtcacactgctcctcatcaagatcatgcaaaagtcctgcaattccccaatattctacatcatccggtgcaagacgtttggcaagtcctctcataattgcctccacagccagagaatgtgtgatataatgttctcctttcatatatttggttaagatttcatacgcctgatctcttgtcatctttgttccctcctgtaatattttctcgataatattgtttaccgccattttaacacactaacagagtaatgtaaataagtgtaaaatctgccgataatgcatacaaataaaaagagcagtgaaacattttttgttccactgctcttgcattacgctgttactgacttatctgcgattgtccccgaaggcatacaatactgttcttctactcttctggtacaacaatcagttcttttgtatagtcattcaggacttcgcatccatcttctgtaataagtacaaggtcttcgatacgaacaccgatgttctcatctggaaggtagattcccggctctactgagaagcactgtccaactttgatgatatctgtgttaacagatgatacatcaccgaactcgtgatcttccagtccgatagaatgtcctgttctgtgtgtgaagtattctccgaatcctttttcttcgatgtagtttcttgctgcaaggtcaacatcgcacattctgttacctggttttgcagctgcaataccacgtaagttagcctctaatactacattgtatacttctcttgcacggtcagatacttccccaatgaatacagttcttgtcatatctgatgcataattgtctttgaatccaccgatgtcaaggattacacagtctccacgttttccttttgaatcatctgttacatgatgtggatctgcagcaccgtgtccatatgctgtaattggatcgaatgatacgtcttcgcatccgagttctttgtagatctcacgcatctttgcatttaattctttctctgttaatccttttgctacccatggaatgatcttgtccatagcaatatcatttatcttagaagactttctcatgagatcctgttctttctcatcttttaccatacggatgtaatcgatgatcggagatccgttcacgaatttgcttcctccgcccagttcctgcagacgaataaggaatttagaaggccatgtcttgtcgattcccatagtcttatctttttccacatatttgcttaagatctctactccgtcttcgatatcatcatagtaaataatatctactccgagatctgactcctgtgggaataatttgttgatcatcatcttatgatttccgttcacattcagatacaatgccagaagtctttctcctggaaagatccattttcctgtcagatagaaaatcgcaacaggatcagaaatgatcatctgtggaatctcatgctcctccattgattttaatactcttgtaagtttaccttgatccataatagaaacccaacctttcttaaatgttgacagaatctgttgctttttttcgccgattctcactgacaattattatagactttctgaatataaaagtcaatttattctattgttctttgataaatatccataaacttcttttttttaaaaagtcagaagattaatagatgttatctacaggacctgccaccggcagctccttacgaacgcatggtgataaaaaagaaatcattcacactttcgcatgtgaatgatttctctttataaactgttctattttattcttcgtcttcagatgttgcagttactgcttcctcatcagaagcaccttcctgcttcacttcttctgcatctccgaattcaaaatcaaaatcatcttcaaagtccagttcgtcttccatttccatctctgtattcagcttgatgtcacggtattttctcatacctgttccggctgggatatgtttaccgatgataacgttctctttcagacctaccagcggatcgactttacctttgatagcagcttctgtcaggacttttgttgtctcctggaatgaagcggctgacaggaatgaatttgtagcaagggaagcttttgtaatacccatgatgatctgctcacctgttgcaggttctttaccttctgcttccagagcttcatttacatcctcaaactcaagtctgtcaacatttgttcccggaaggaattctgtgtctccggactcttcgatacggatcttcttcagcatctgacgaacgataacctcgatatgcttatcgttgatttctacaccctgcagacggtaaactctctgaacttcctggatcatgtaatcctgtacggcacgaagtcccttgattctcaggatatcgtgtgggtttacactaccttctgtcagttcgtcaccggcttcaagctcagctccgtcagctactttaatacgtgatccataagggatcagatatgctttggattcgcctgtttctctatttgtaacgatgatctcacgtttcttcttagtgtcatttaagttagcagttcctgcgatctctgtgatgattgcaagtcccttaggctttcttgcctcgaaaagctcctcgacacgaggaagaccctgtgtgatatctccaccggctacaccaccactatggaatgttctcatagtcagctgtgtaccaggttctccgattgactgtgcggcgatgattccgacagcttcaccaacctgtaccggctcaccagttgccatgttggctccgtaacattttgcacatacaccgctgtgtgaacggcatgtaaggattgtacggatcttaatctgtgtcagcggttcacccttctcgtcaacacccttcttgcagatcagttccgcacgcttaggtgttaccatatggtttgcttttacaaggatatttccatctttgtctacaatgttctcacagatgtaacgtcctgtgatacgttcctgtaagctttcgatgacctcgtttccatccatgaatgcttttacatacattcccggaatcggcattccaggttttgcacagtctacttcgtggatgatcagctcctgtgatacgtctaccagacgtcttgtcaggtatccggaatcggctgtacgaagagcagtatctgacataccttttcgagctccatgtgcagacatgaagtactccaatacgtccagaccttcacggaagttagacttgattggcagctcaatcgtatgacctgttgtatcggccatcagaccacgcataccagcaagctgtttgatctgtttgtcagatccacgggctccggaatcggccatcatgaagatgttgttatatttatcaagaccgtcaagcagtgcctttgtaagggcatcgtcagttgctttccatgtctctacgacttctttatatctttcttcttctgtgatgagaccacgcttgaagttctttgtgatcttatctacagtatcctgagcattcttgatcatctccggtttctgcggaggtaccgtcatgtcagaaatagatacggtcatggcagctcttgttgaaagcttgtaacccatagcctttacatggtcaagtacttctgctgttgcagtagcaccatgtgtattgataactttctcaaggatctgtttcagctgtttctttcctacgtggaaatcaacttccagaaggagttcatttccttctacttcacggtctacaaatccaagatcctgtgggatgatttcattaaacatgaaacgtccgactgtagattctacagttcctgtcttcacggttccgtccggcatcttcttagatacacgtacttttacacgtgaatggagtgtaactgctgcgttctcataagcaagcagtgcctcgttgaagctcttgaagatcatgccctctcccttggcaccaggacgctcctgagtcagatagtagataccaagtaccatatcctgtgaaggaacggctaccggaccaccatcagacggtttcagtaagttgtttggtgacagaagtaagaaacggcactctgcctgggcttctactgacagtggcagatggacagccatctggtctccgtcgaagtcggcgttgaacgctgtacaaaccagtggatgaagcttgatagccttaccctctacaaggattggctcgaatgcctggataccaagtctgtgcagtgtaggagcacggttcaacataaccggatgctctttgattacttcttccagaacgtcccatacttccggctgaagtctttctaccatcttcttagcatttttgatattgtgtgctgttccgttctgaaccagttctttcataacgaatggtttgaacagctcgattgccatttcttttggcagaccacactggtagatcttaagttccggtcctacgacgataacggaacgtccagagtagtcaacacgcttaccaagcaggttctgacggaaacgtccagacttacctttcagcatgtcagaaagagatttcagtgctctgttaccaggtcctgttaccggacggccacggcggccattgtcgatcagggcatctacagcttcctgaagcattctcttttcgtttctaacgataatgtccggagcgcctaattcaagaagacgtctcagacggttatttctgttgatgattcttctgtacagatcattcaggtcagatgttgcaaaacgtccaccatccagctgtaccattggacgaagatccggcgggataaccgggatatttgtcatgatcatccattctggtttgttaccagactcacggaaagcttctactacttccagacgttttacgattcttgcacgtttctgcccggttgcacccttcaggccttctgtcagttctgcatattctttctcaagatcaatgttctcaagaagctctttgatggattctgcacccattcctacacggaatgcgcttccccatttttctcttgcttcctgatattcagcctctgataatacctgtttgtacatcaggtctgactcgcccttatccagtacaatataagaagcgaagtacagtactttttccagagttcttggggacaaatccaggatcagtcccatacggcttggaattcccttgaagtaccagatgtgtgataccggagcggcaagggcgatatggcccatgcgctcacgacgtacacttgcttttgttacttcaacaccacaacggtcgcagaccacacctttatagcggatctttttatactttccacagtggcattcccagtccttgcttggtccgaagatcttttcgcagaacagtccgtctttttctggttttaaagttctatagttgatggtctctggtttggtaacttctccttttgaccattccagaatcttttcaggtgatgccaaaccgatcttgatcgcatcaaaagtcattggctgataagtttgttccttattattttctggcatactttggaccccttcctattcatcgtcagatgaatcgccgaaatcatagtcatcattttcttcaaagttcatatcgaaatcatcgtctgattctggttcttcttctacatcaaccagttcttcaccctggaattcctgtttgctgtatccgtgtttaccaaagtcttcgtcatcatcattacgatatcttctgtctccctcgatcagagaacggaaatctgtctctcccatatcggaagtttccatgatctccacttctgtattgtcatcacgtaagacacgtacgtccagtccgagtgactgtaactctttgagcaataccttgaaggattccggaattcccggttcaggaatattttcacccttgatgattgcttcgtatgtcttcacacgtccgatgacatcatctgacttcacagtcaggatttcctgcagtgtgtatgatgcaccataagcttccagtgcccatacctccatctctccgaaacgctgtccaccgaactgagcctttcctcctaatggctgctgtgtaaccagtgagtaaggacctgtagaacgtgcatggatcttgtcgtctaccaggtggtgcagtttcagataatgcatgtgtccgatggttacagggctgtcgaagtactcacccgtacgtccgtcacgcaggcggaccttaccatctcttgaaattggaacacctttccagagttttctgtgttctctgttgtctgacagatactgcagtacttccggaagaagttcttctttatgttttgcttcaaactcttcccagcttaagttgacatagtcattagccagatcaagagtatccataatatcaatctcgtttgctccgtcgaatacaggagttgcgatattgaatccaagtgcctttgcagccagggacaggtgaatctccaggacctgaccgatattcatacgtgaaggcacacccagtgggttcagcacgatgtccagaggacgtccgttcggaaggaacggcatatcttctactggaagtacacgggaaacgacacccttgttaccatgacgtccggccatcttatcaccgacagagatctttctcttctgagcgatgtagatacgaactgactggtttactcccggtgacatctcgtctccgccttctcttgtaaataccttggcatctactacaataccgtattctccgtgaggtactttcagagaagtatctcttacttcacgggctttctcaccaaagatcgcacgaagcagtctttcttcggctgtaagttctgtctctcccttaggagtaaccttacctaccaggatatctccggcacggacttcagctccgacacgaatgatacctctttcatccagattcttcagtgcgtcatcgccgacacctgggatgtcacgtgtgatctcttctggtccaagctttgtatcacgtgcttctgcttcatattcttcaatatgaatagatgtatatacatcatcctgtaccagtctttcacttaacagaacggcatcctcgtagttgtaaccttcccatgtcatgaatccgatcagtgggttcttaccaaggccaagttcaccatttgatgtagatggtccgtctgcaataacctcacccttttctactctgtcgcccttgaagacaatcggtctctggttatagcagttgctctggttacttctctggaattttgttaatttatatttcttcagttttccgtcgtcctgacgaactgtgatctctgtagaagtagaacgttcaactgttccgctttcttcagcaactacacatacaccagagtcaacggctgctttttcttccataccagttcctactacaggagcctctgtgaacagaagcggtactgcctgacgctgcatgttggatcccatcagggcacggttcgcatcgtcattctgaaggaatgggattaaggctgtagcaacagagaacaccatcttaggagatacgtccatgtaatcgaacattcttctttcatattcctgtgtctcttcacggtaacgaccagatacattcttacgtacgaagtgtccttctttatctaactgttcgttcgcctgtgctacatggtagttatcttcttcatccgctgtcatgtatacaacttcatctgtaactaccgggtttgtcggatcatcgtggttgatcttacgatacggagcctcgataaatccatattcattgattcttgcataacttgcaagggagttgatcagaccgatgttaggtccttcaggtgtctctactggacacattcttccatagtgagagtagtgtacgtctcgaacctcgaatccggcacggtctcttgaaagaccaccaggtcctaacgctgaaagacgtctcttatgagtcagctcaccaagcgggttgttctgatccatgaactgtgacagctgagaagatccgaagaactccttcactgctgcagttacaggcttgatattgatcagggactgtggagagattccctccatatcctgtgttgtcattctttcacgaaccactctttccagacgggaaagaccgattctgtactgattctgaagcagctcacctacagaacggatacgtctgttacccaggtggtcaatatcatcatcagttccgatgccatattccagatgcatattgtagttaatagaagctaagatatcttcttttgtgatatgctttggaatcagatcgtggatatctctcttgatcgcatcttttaactcatcgatgtctcctgctgtctcctccaggattcctgcaagtacaggatagtatacctgctcggtaactcctacttcttccggatcaacatcaacaactgcgtcaaggtcaaccatcatattagaaagaaccttgatcggtctttctgtttcttctacgctgatccatacatatggaactgcgttattctgaattgtagaagccagttctcttgtgatctttgttccggcttctgccagtacttcgcctgtcatcggacttgcaacatcttctgccaggacatgaccgctgatacggttctttaacgcaagcttcttattgaacttgtaacgtcctacttttgcaagatcataacgtcttgggtcaaagaacatacttgtgatcagactttcagcactgtctactgccaaaggctcacccggacggatcttcttatataattccagaagtccttcctgatagtttgttgcagcatccttttcaaaacttgccaggatcttaggctcttctccgaagagttcgatgatctccgggtttgtaccgattcctaatgcacgaatcaacacagtgatcggtacctttcttgttctatctacacgtacatagaaaacgtcattggaatccgtctcatactccagccacgcaccacggttcgggattacggtagctgaatacagttttttacctaatttatcatgtgcaatggcataatagataccaggagaacgtactaactggctgacgataacacgctctgcaccattgattacaaaggtacctgttcttgtcatcagcggcagatctcccatgaagatctcatgctcattgatttcatctgtctctttattgtgaagtcttactttgactttcagaggtgctgcatatgttgcatcacgttctttacactcatcaatcgtatattttacttcatcttcacacaaagtaaaatctacgaaatccaggcttaattttccactgtagtctgtgattggggaaatgtcatcgaacacttcatttaacccttcttccagaaaccacttgtaagaatctgtctgaacttcgatcaagttaggcatctgaacgacttctttctgtcgggcatagctcattcgtgaactttttccgcttttaataggacgaattctgtttttctccatattgacgtttcactcctcatttatttttctggctgggctttttaccgcccatataacttgcagagtctcaaaaacaacgtattttttgctgtttttcatacgcagtcatggcataactatccacaatagcgcattttttactatagcataagcttgtcaagtatgtcaagcaaatctgtgttatttttttcagttttttcaagactttgtcggtactgctgaacataagaaaaaatccgctttgcaggctctttcttatattcagcatccctataatacgaaagggcatcccgtcaccggaatgccctgataattcaatcaaactcgaattatttaaggttaacttcagcaccttctgcttcaagtttagtcttgatttcctcagcctcagctttagaagcgccttctttgattacctttggagcttcgtcaactaatgctttagcttctttcagtccaagtcctgttacttcacgaacaactttgataactttaaccttagctgctcctgcagaaactaattctacgtcgaactcatctttctcttctgctgctgctccaccttcagctgctgctgcaactacaacacctgctgctgcggatacaccaaattcttcttcacaagcttttacaagatcatttaactctaatacagataactctttgatagcttcaataaattcttctgttgttaactttgccattttattttcctccatttttcttattttctttttgaaataaaatattatgctgccatcagcttattcagctgctggtgcctctgcagcttcttctgctgccggagctgcttcacaagcatctgctccacctttttctgcgatctgattgagaacgcgtgccaggtttgtgataggtgactgtaagcttccaagtaatttggaaataagctcgtctcttgaagggatcttagcaagttcatttaatgcatctgtatcatataatgttccttcaaccacacctgcttttaattcaagggcttttgcattctttgcgaatttgcaaaggattcttgctggagctgttgcatcatctttagaaattgcgatagcgcttggtccttctaagtgctcatctaatgctgcgaaatcagttccttcaaaagctctcttcatcattgtgttcttacaaactttgtagacaacgcctgcttctcttaactgtttacgcatctctgtatcttctgcaacagtcagtccacggtagtcaacaaggacaacgcttactgcgtctttcacgtcctctgcaatagcctgtacaactggttgttttaattcaacttttgccacgaatggtgcacctccttgtagatttgtaagtttacaccgccgatagatataaatgtaaaaaaacctctatatccaaagacatagaggttgataagtcatactttagtatcgatctttcctcggtaggcgtccgcataaaatgtgttcttacgctctttcaagcacctactgtcttcggcagtcctttagtaggttatcatatacatacgttattgtcaagaggttttttcatttttttgttttttcttttacgaaatttttttcagcacaccgatctgcatttgctctgctccatcttttatgttatccggtcttttatgcttctaccacggccgctttcatcttctgcacatattcttttacatacgctacacagtctgctccatgctctgctacgatccttacaattgccgatcccacaattacaccgtctgaaaatgccgccatttttctccgccctctacactttccaacagatagtatcttttactcaccgccacaatcttgcgaagaagcgtgatcggtgtgataacatctgcataaatctctttgcataccggaattatgtggtagtccggtgcaagtctcatgatttcttcacattctggatacatagatatgatttctcctttaagttctgattgtcttgctgcctgtgtatggaagtgttggaacggattgtatttttccacaaaaaaactctgtatacagcatcacatctgtatacagagttctttattcattattatcttgcggattaaacaagcttcattgggttgatctttacaccaggtcccattgtagaagtaagagttacgctcttaaggtactgtcccttaactgctgcaggtcttactttgttaatcgcatcaataagcgtctggaagttgtctgtaagctgttcttcagtaaagcttgctttacctactggcacatggataatgtttgtcttatcaagtctgtactcgatcttaccagctttgatttcctggatagcttttgtaacgtccattgttactgtaccagccttcgggtttggcattaatcccttaggtccgagtacacgtccgagacgtccaacaacacccatcatgtctggtgtagctactactacatcgaattcaaaccagttttcattctggatcttaggaatgagttcttctcctcctacgaaatctgctccggctgctttagcttcttctgctttagcgtcttttgcaaatacaaggatacgaacctttttaccagttccgtgtggcagaactactgctccacgaatctgctggtcagcgtgacgtccgtcacatccagttctgatatgagcttcaatagtctcatcgaattttgctgttgcagtctttttaactaatgatactgcgtctgctacatcgtagagtgttcctctgtcgattgtcttcgcagcttcaacgtatttctttcctcttttcattctataaacctcctagtggtattggcgggataaccctcccacattaatcttcatcaattattctgttacagttacacccatagagcggcatgtaccttctaccatgctcatagcgctctcgattgtagcagcgttcaggtcaggcatctttgtcttagcgatttcctctacctgagcttttgtgattgtagcaacctttgttttgttaggtacacctgaaccagatttgatgttgcaggcctttttgatcagaactgctgccggtggtgtctttgtgatgaagctgaaacttctgtcattgtaaactgtgataactacagggatgatcatgtctccctgatctgctgtcttagcgttgaactgttttgtaaattcaacgatgtttacaccgtgctgaccaagagcaggtccaaccggtggtgccggagtagctttgccggctgggatctgtaatttaatataaccttctactttttttgccatttcaattacctccttgtggtgatggcggggaacatataacgcccctcccacttactgttacattttcttaacttctgcgaaaccaatttcaaccggggtctcgcggccgaagagctcaacattaatagtaaggctctgcttctgcatgttgatagactggattacaccaaccgtatccgcccatgctccagcgattacctggactgtgtcgccctcctcgtagtccatgactacttcctctctctggattcccagaggagccatctccgcatctgtaagcggcaccggcttagatccaggtccgacaaatcctgtcacacctcttgtattacgaacaacgtaccatgtatcatcgttcataatcatgtgtatcaacacatagcctggaaacatctttttctgagatactttctggacaccgttcttcatctcaacaacgtcttccagcggtactcttacttcaaggatctgatcctcaagatgtctgttctcgattgtcttatcaatgttggcttttactttgttctcgtaccctgaataggtatgaactacataccattttgcctctgacataatctcacctttcttgtccgttttgagttatttaattaataaatctactccgtactgggcgaaaaaatctacaagtgcgataatcgctcccaggaccacggatacagaaacaaccgctgccgtctcttttgcgactgtcatcttgtctggccatacgatcttcttgaactctctgttcagacctttgaaccagctttctttctgagttttcttaccactcatcgacattcactccttcttgcggcgattattttgtctctttgtgcaatgtgtgtttcttacagaatctgcagtacttcttggtttccatacgttccggatgagatttcttatcctttgtcatgttgtagttacgctgcttgcattctgtacactccaatgtgattcttgtacgcacaacttccacctcgctttataatcttagttaacgtgtttcgtggcagcttgcgatgctgcccgattttaggcataaaaaaaaagcctacttccattcgcccgaatatcgtatcatatccaggcttaaaaagcaagccttttcctatattattttcgcgaaaatttatttattaaaacactttatccgtaactgccaaaccatttattgcgattccctgtaccagatacttcccggattcactgtacgaagctgatagtttccgtctttataaacgaattcggcactcatctgcgaacttccatccaccgttccgttcatattgccaactgtaacatcttctttctgatatgttactttataatcataagacaacgttcctctcacaactccggtcacaccactgatcacatattttccttcataattatcagttgttatctgatccgctttataaccatcttttgaacttaactgttctttcagatcatcatagaattctttattctctttttcatattttgaattcttttcaaataaccctgatatttgtgagaatggtttttcttcttttgcagctttgatataactgctcagaatttctttcattttcttatccagcttctttttcccgctttgtgatactttcattttagagattgttgtacttcccttatcggatgctttgaattctgatttatacgtcttaaaccacggaacgtctatccttatcttatgatctccttcaaacaacgatattttatattgatccaggccatcggaatcatcttttatcttatcgttttttgtaagcttcgttccatcgatccaggccgtcgatccagccggaatataaaggttaaaatcatttgcgatcatcttgtccgaagataccttccagtttgcaaataacagcagtctttgtctcttttgcttttgcagaacaacggtttctttgttcttaccttgagtttccgtcttgtattcgaccgtaaatgctctttgttttcctccggactctatctttatctggcgattttccttcgtctcttttatctgataatcctctacaccggtaacggcattcttcttcatatatgttgtatattcatcctgtgttgcatatccattcttcggaagatcagacagatgtcccgtctttttccagtcttcctttacataagccttacagtaacgttccgccactgcttccggacgtccatggtaactttcaaaaatgcaaaatgccgcaaatacagcggctcctgccacaattcttttcacagccttcttctgcttcgctgtcagatctgaccaggaatgcttctctttgataaactttggtatacggcttggatccttcccttcacgctcacgttttatctttttttctttgcgttttctttcccatgactgaaggatctcttcatatgcatcttcttccgggacatcttcatattctcttttcttttttataaaatctccgatatcaccggtaaacatccgtgtcggctcatccgcctcttcctctgtcttctctccgatcataagcgtcggctcactgacaccttcagtttcatccaaatgactctgttctttaccggatccttcttttaacttgatcttccggtgaagttcctgctccagttcctgtcttgtaacttcttctatcatccggtccaggttctcgggaattgtaagctgttttttcagctgttcctgctctgtgtctgtatcctcatcttcttttctttcttcttttttttcttcttgcaggaatacctctttttcttctttctcatcaggattaagtaacttcttcgcttcatcaattactttttctgattcttcttcgatctcctgatcagaaaattctgtcttcggagcttcttcaagctcatccaggtcactgtataatgtttcctcttttgattcgggaagccgcattccgcaataattacagaatctggcatcgtctggattgttagtcttgcaattcgggcattgacgcatagagctcctccttttcaaatcacattttacattatcataacattttctttctcttaaatataataatacaggtaatcataaccacaacgcttaagatgatcactcccggatatccgtgctttagttccggcatattatggaaattcattccataccagctggtgatgagtgtaagcgggaagaaaatcgttgatattacggtcagaaactgcatgttgttattctgctgggcatctacctgcgccttataagcatcccttacctgctgggcatattccagaagctgcgatgctttactcatcagtctgtctgcacggtccgagataacaccgaaatatttcacctgtttcttggcaaagaaaccattttcattctcttcgagctgttttcccatgtccatgatctcatcataataactgcggagtgtcaaaagttcacgtcggatcggcatgatcgcattctggaatccctggatttttccgtccatgacaccttcttccagatccatgatccgtttctcataatgtcccagaagttccagatcccggcttatgaattccagcataaaattatagatgaatttttctttcgattctccctgtctcgtcttcttcctcttaattctgcggatcagacggtaagaaaattcatcatcgtccacaatcacgatatgatgacggttaataaaaaataagatcttgtatcgttctcccagaatatccagaagctttggaatacaaagagaacccgcaagacattcctgctgagtctccatcttacaaaatcctacatctttcagattgatctctccttcatactgcatgccggcctgttccaggcagtctctggcagtctgcgatgtcgccagaaataccgatggtctgtccttctccatgatttcttcctgatattcctgcagcgtttctcctaatacgtatctcatgccttcaccatcctcgtttgttcatcctgttttacttcttgcattataacactaacttggaattctagcacatattctcctgctgtttttcaaaatcccgtaaatcttatgtaaaatcttgtcacaacacatgcatggcaatagaaaaatccggcaagcctcacaaaaagccgccggatttttacttttaactacatttacaattagaataatcctgtaattcttccttcatcatctacatcgattctctcagctgccggaactttcggaagtccaggcatagtcatgatatctcctgtcagagctacgataaatccggcacctgcggagactttcaggttacgtactgtaatatcaaagtctgtcggtgctcccagtttcttcggatcgtctgtcagactgtactgtgtcttcgccatacagatcggtgcattgccaaatccaagatctgtcagttgttttgcctgcttctgggctgctgcggtaagaaccactttatttccaccatagattttctgtacgatctggttcagtttatcttcgatcgttccttccagttcataagcatagtggaaatcactcggctcatcacacagacgtaccacttcttctgcaagcttcaggccgccttcgccgccttttgcccatacttcggacagtgcaacattgactccgacttctttacatttttcttctaccagatccagttctgctttggtatctgtcgggaatgcattgatcgcaactacacatggaagaccgtatacattcttaatattgctgacatgcttcatcaagtttggaatacctttttccagtgcttccagattctcttcattcagatccggttttgcaacgcctccattatacttcagtgctcttaccgttgctacaatgactactgcatccggtttgatgccagccatacggcacttgatatccaggaatttctcagctcctaagtcctctccgaatccggcctctgtaatcgcatagtctgcaagcttcattgccattcttgttgctgtcagtgagttacatccatgtgcgatattggcaaatggtccaccgtgtacgattgcaggtgcatgctccagtgtctgaacaaggttcggtttcagagcatcctttaacagcgcacacatcgctccctctgcatgcagatcatgtgcagtaaccggtttctgctctgcgatcttgccataagtgtaacctacgatgatctttccaagtctttctttcagatctgcgatatcctttgacagacacaggatcgccatgatctcagaagcgacagtgatatcatatccgtcttctctcggcacaccattgactcttccgccaagtccgtctgtgacgaaacggagctgacggtcattcatatcgacacatctcttccatacgatctttctcggatcaatattcaaatcatttccctgataaatgtgattgtcgatcatggctgccagtaagttgttcgcagctccgatcgcatgaaaatctcctgtgaaatgaaggttgatatcttccatcggtacaacctgtgcatatccgccgccagctgctccacccttcataccgaataccggtccgagagatggctcacgcagtgctaccacaggtttcttacccattctctgaagtgcatctgcaagacctacggttgttgttgtctttccttctccggcaggtgtcggattgattgccgtcacaagaatcagttttccgtcttttttatcggatttctttaagaaattataatcaatctttgctttatattttccatactgttccagatattcttctggaattcctgctctttctgctacctctgtgataggctccatagtacactcctgtgcgatctcaatatctgttttcatcattcattcctcctgatcgtatgttgtctttccgcatttccagtccttttgatacactgcttccaactcttccgataccgggcggtgtaaaaaaaggacaacactcatcctcttcgggataaatgctgcccagacggtcggctcttaccaagtatctgattcccctgtggtactccacattatccgtcagtcatcagatcttctctttgacttttactatattataaggacgcaaaattgtcaatccggaaaattcatccggatcatcgtaacacagccattattttttctcttttttaataaccgtagattctttccccatatgatattctcttcccagcgcccgcataatgcttcttgaaatcacatccacaatgatgaatccaaacgcaatcccaaggcatgtttccaacagtacaagtgcatgctctgctgccagtgaaaagttcctgctgactacgccatacatcagataatacaatctcgctcccggcatcaacggaaagacggatgctgtcaggaagacggtggacggcgcatgattgactctcgacatgacaaatgcatagcccgccacaaagcaggatgcaactactaccgcaaagaaattatccggataccacgcatacaccagtaaatagattccccatgtcaggaaagctccgacactggaatacaggatcttctttccccgtatcttgaaccagcttgcataaccggtacatcctatcgtacaagaaatcagctggatcactgtattattattcacatcgaatccttccgccgatatatttcccatcagcatcattgcaagggcaataccgaatgcgataccaaatgcaccgagcatcgaattcatcacttccagtgaacccgagataaagttcctctgcatcacatcccgcattccgttgatcgcaccaagtgcactgactaacagcatgacaattccgatcatgatacggtccggatgatgtcccagcccgctccggacagctgttacgatcacaacctctgataagaatgccaggatcagattatagatcatcgggttaccttcccgcctgctaagccatctgcctaccagaacgatcatcagacagacgattaatgcaacaactgcatcctgcagatcacatccgaagaatacagcaaacgccgttccccctgtaatctgtgcaagccctgtgatcagttcactctgatccggccgcgccattactttcttaaagcgccggaccagttctttttcatccggattatgtgaacagacataccgcgacatggcattcagataattcaatttatcataatctgcccctgtagactctatatgccggatctgtgtaatgatctcaccttccggtgtctccaccgtcacctggatattgctcggaatcacatatacatcatatgtcataaaaccataactcttatacatacgatacagactgtcttccacgcggaagatttctgccccgcactgtaacattgcttctcctatattcaagattccctgtactaatttttcataattcataggcagctgtccttttataatttcatgttttacacgtttgtttccatttatatttccctatttttctttattttcaatatatgtagtacgttctgtataagctcagtttaacacacactttttcattttaatatagcaggggaacacagattcctgaaaattatttgtgtctgtgatacatctgtaccggcgtattttcctgcatcttttcccgtagcttttcatatctgcagttcctgccactggcagtttctcttgcatactatggtttaaaaaatctgagaatatacaggaaaagattgcttctcttccagcatactctcagactctctgcttatttctattttttatttctataattatttctttccaccgatcagaggaagattcaatgcactcttaccgatatgatattctctcttcagtgcatacatgatacttctggatgccacatctacgatgataaatccgaatgcaattgcaagacaggttgccatcagaacaatcgtctcatcgaatgccagttgtggatcctgactgacacatccatacattacatagtacagattcggtcccggaatcagcgggaataccgatgctgtcagaaagatcgttgaaggtgccttattcactctggacatgataaatgcgtaaaatgcaacgaatactgctgcgatcatcgttgccaggaaattgcttggcttcagtgcaaataccacaacatagattgcccaggtaaagaatgctccgatactgttataccatacctgctttcctctgatcttaaaccagaaagcaaatcccgtacatgcaaccgtacaggagatcagctggatcggtacactgtgattcaggataaaatgatcggaatatccttcatggaacaacatgatcgcaagaccgattccgaatgcgattccggcagctccaaggaacgagttcatgatattaataaatccagagataaaatccctctgaaggagatcacggattccattcgtcgtgcccagtccactgatcagcagcataacgataccgatcataatacggtccggatgatctgcaactcccatcttcaatgccactataatgatcacttctgatatgaacgaaagaatagcattataaaccattaagttgctttcacgctttgccagccagtcaccgacggccacgatcatcaccgatacgatcaatgcaacaatcgcatcccagacgttacagccgaagaataccgcaaatccggttccacccatgattcctgctgcatatcttgtaattcgcttctgcggttcacgattgatgacttcgagatatttctctcgcatctctttttcatccggtgtatgctgacagacatatctgcacagattgttcaggtaatccagctgatcaaaattcggttctgatgactcgatatgccggatctgtgtaatgatctctccttccggtgtctctaccgtcacctgtatattactcggaatgacaaatacatccgatctcttaaatccatagcttctgcacatgcggtaaaagctgtcttccagtcggaaattctctgcaccactttgaagcatcgcttctccgatgtccaggattccctgtacaatcttgttataatccatcttttttaccccttgttctattcataaaatttccattttctaaatccaacatttgaatcatatcatggattttctataagtcaacaaaattattgtaaaatgtaataacagtttgtaatacccgtcttagaagttcttatattttttcttctttctctcctttttgcgtatgctttatgcagaatttctcataagaacggtttcgattatacctgttcttttacctgacttctgtcttcttttatatttaagctatattctacacccagaagctgaacagcgggaaagatttttcttataatttattaagaaaactttcccgcattatctttttattatatgataattctaatattttattggctatgctgcctatgctatatgttacactagaagcagcatatcatccgcatgaaagcaactctatacatacagaaagatacagaaaggaaacattatgtctgattactatatttcacagatttcacactctgataaaactgcaattcagggtgtcaccgctcttcttcaggctgaggaaatccgcctggataccaaccttgattatacgtgcggcatgtacgatgatgagatgaatatcatcgccaccggaagctgcttcggcaatacactacgctgtcttgccgtaggttccgaccatcagggcgaaggacttatgaaccagatcatctcacatctgatcgaagtacaatttaaccgcggaaatacacacctgttcctctatacgaaatgttcttcggccaaattcttcggcgatctcggattctatgaaatagcaagaattgacggacagatcgtgttcatggaaaacagacggacagggtttaaaaattatctgaagaaactgaaagattcttctgccctgcaacttcagactcttacagaaagcacatctgctacaaaccgtaaggttgccgccctggtcatgaacgccaatccgttcactctcggtcatcagtatctagtagaaaaagcagcccgcgaaaatgacctgctgcatcttttcatcgtaagcgaagatgcaagccttgttccgttcaaggttcgaaaacagctcgtaatggaagggaccgcacatcttgataacatctgctatcacgacagcggcccgtacatcatcagtaatgcaaccttcccgagctatttccagaaagatgaaaatgcagtcatcgaaagccatgctatgctggatctgaccgtcttcaccgaaatcgcacggacactcggcatcaaccgccgctacgtcggcgaagaaccaaccagtctggttactggaatctataataatatcatgtcagaaaaactaccgggaaacggcattgaatgcgtgatcgttccaagaaaaactgatggtgaaaaagccatcagcgcttctactgtacggcaggcgattaaggataatgatatgaatacattgaagaaactcgtgccggaaagtacgctgcggtattttgaaagtgaagaggcaaaggatgtgattgcacggataagaaatgaggagaatgtgatacattattaattgcttcattgtggcctctcagtccacgagaaagacctggtaaccgcagcctgatgcattaaacccacaaaacacagagagaagggaccggcccatccagaccgatccctttttgcagaaccaatacccttaagtcctgcaatggtaaaactttatgaggaataacaatataattgataatgtctataatttgatcacacccaggatcagtccggatatcagacagataatgctgacacccccatatccagaagaaacatttcttaatatgatctttgatctcaacacccgcaagaccgacaccaaggaaggttgcaggcacgacaagactgataaatgttgcacagttacggcatacaaccataacaatcgcaatgtgtgttgcttcgactccgaattctccagcgatgctgatcaggatcggcatcagaccgaagaagagtgtctcaaggacaaccttgcggatctgattgccatactgattgattactgcactgtctaaggacaggtcgatctttccttctccggcctctaccattacctgacagtcactggattctaatgttcccgctattgcaggtcttttgatctccatgtttgtatcctcctctttcatttatcttgtgactttgtttatctctttatgggtttatcatagtcttggaaccttacaggagagagtggggttttcttaatatttattaaggtacggaaaagactgcagccatgtaacagctgcagcctttgtttttatatataatcaaatattctttttctggaaaatttactggtaaaatcttataatgattacaaagaatatactatgtaaactcaatttaaatatatacttttgatacgaaaggaattctttcaatatgaacggaataaacgtaactatcacagatatgatgaactgccgcgaccggcgtgtaagcatccagaacgaactgatcagtaaatatgataaaccagtcctgtctttttgcatgaacatcccaggaccggtaaaaaccaacgaactgatccggaaagcttttgattccggaaaagcagaattattaaaagctctttctgctcacaatataacaatccttcacaccgaagaattccacgaaccttccggtgatgaactgatcatggcattggatgcacccgccgaagatatcaagacacttgctactgaaattgaagaaagccatcctctcggacggctctttgatatggatgtcattggaactgacggtatgaagttatcccgcggcacctaccgtaaatgcatcatctgcggatgccaggcacaggaatgtgcgcggtcacggaagcattccgtggaggaattgcaggcaaagattgaggaattattaaatcagttttctatttaattaattatcgcggcctctcagtccatgagaaaaacttggtgctctgtttgctactaagattccgtgatgtaagaaaatctaaggatgtccaaatctcctaaaagcaaaggcattccactcataactcgcttcgctcaaacaattcgttccatgcctttaacggagatttgaacaccctaagtttttctaaacatcactccatatacgcgacaaacagagcatcaagtctttctcatgtcgtgcttggccaatgataatgaattcaatagagggttgtaacctttgtgtgcagccggaaagttnnnnnnnnnnaccgcttaatgcattaaatagcaactcactcccggttcttattatacacaaacatccaaagtgccatcgcacatatgatcacataccccaacacgctatacctatccggcacctgcccgaacagaaagaatccgaggatcgtcgaaaaaataatctgcgaataatcataaatggatatctctttcgcaggtgcatgataataagccgccgtaattccgaactgtccgcctgcagccgcaagtcccgcacctagaagcgttaagatctgcaagccgctcatcggatggaaatccagaagcagatatggcagtgtaaccacacacgagaatcccgagaagaagattacaaccgaagaacctttctgtcctctctgcccaaggatacgcaccatcgcataagcaatacctgcgcagatcccgccgcacagtccgatcagtgacggtaccagtgccatattcgtaaatgtcggtttgattacaaataagcttccgataaatgcacccgcaaccgccagtgcctgtgccggactcatcttttctttcagcaataaaaacgaaaagataattacaaaaaacggcgacatcttattcagcatcgatgcatccgacagcaccagatgatccaccgcatagaaattacacaagattcccaccgtaccgaatgtcgcacgcagaatcatatatttcagatttcctttttcgattttgaatccatccttgcttcttatgatcatgatcagcgcaataaaaaaagctaccagatttctgaaaaaactcttctgtaccgaaggcagatcaccggataaccttacgaacgcattcataaatgcaaatgataacgccgataatgtaataaaaaatattcctttgtatctggaattcataaacttacacttccttatgatttatttctttatatcttatgttatgtcatttatcttaccacgaaaacttttgcatgtgaacacatccgactgttggacttgattttgtgcaactaatacacctctttcacattgtcgcattcccccataaaagcttccctctgttgatagaatttcaactacagatatgctaaaatatttttggataacgaaaggagaaatgcaacatgagaccccttgagacatttatcgaacaacgcaaagaacgcttcgtcagaaacagtctgatgtctgacgaatttctggattttgttaataaaaatatgaaaccaatagagaaacagatgtcctattatcaatgtgccatcatggaagtagagacaaaattcaaagtattaaacgaacagtattccctggaatatgaccgcaatccgattgaagatatcaaatcccgtgtcaaatccatggaaagcctgatcaaaaagatccgtaaaaaggatataccgctcaccctttcttctattgaagaaaatatccatgatattgccggtgtccgtgtcatctgttcttttctggatgatatctatatgcttgcggactgcctactttcccaggacgacatcacacttcttgagaagaaagactacatcaagaatccaaaaccgggcggataccgcagtcttcatctgatcgtcagtgtaccaatctttttacaggacggaaaacgtaacatgactgtagaagtacagcttcgtacgattgcgatggatttctgggcaagtctggaacataaactgcgttacaagaaagatatcccggctgacaaagcaaaatatctggaggatgaaatgcttgcgtgcgcacagatcagtgccgacctggatatgcgtatgcagaatgtccgtgatgtgattgctgagaatacaacaccagatgagcggcctttattattaaaagaattgtcataaaaagacatattgaaaaatacactaaaaaagcactgtgaaatccggtaatatttcacagtgctttgccactacgatattctaaagtgcccgacaatatccgttctctcctgcaggatatcttcttcataattcttctgatacggatcattatgatgaatcacatatggtacaccttccacattccgtctgtcagaaatcaccccgatatgattcttgaacactacaatatcgccgccctgccattgttcaatgtcatttacatccgtggtcaggctgatcgctgtatgttcaaaatatattttcaggttctttactcttcggaaatcaatatttttatccggctcatcgatatcataatccttcggattcttcctgatatcttcgtctaccagttcccgcaaatcatatccgcttttcttaagcgcatatccgacaacatctgtacagacaccatatctgtcatccggataaccagtctgataatatctgctcttgtaaaccggccgcttcttcacgtaaaccaatgcattcgtcaaaatatcggtctgatcatccgtaccgtcaccatctttatccacactgctatgatacggtgtgatctctgtgccgttatattcattctttggccggtctgtcttcgtcaatcctaccacatcacgtcctgccaggaatccgccaaaggtcagccagatgataatagcgatcggaactaagatccggaatttcatctttcttgtcttatgatgaaatacaatcatcccggcaaatgcaccaaatgcaccgccgacaaacgcaatccctatcaacactgcctctttgatccgccactgatgatgcattgctttcgctttatccgttccatataaaataaatgcaacaatatttactacaacgagataataggatatcggtgtcgccgccgtaagtaattttgccatcttccgctcccctccttcgcatctccattgtatcttacctttggttagctttcaatcagaaaaccgatataattataaacttccgaaaaatcaatctcacattgtccaccccatatatatactggtactttagaatcaaagccatagatcaccggataattttcttcatcaaaaatatatacgaatacacgtcttccttctatatctaccatccaatattcttttactcctgcattcgcatatttctgaagctttataaccatatctcttcttctcgtagactttgataatacttctaatataaaatccggcgcaccatatatccgattcttatatagtttgtcccggtcacatacaatcatcacatccggctccacgatcgtcttattatcacagtcaagctgtacatccaacggagctattaatggtatgcaatttcctttatttttggaaataaattcaagaaaccttgcgtaaatatatcctcccaccatctgatgtaatgtttccggtgacgccatatcatagagcacaccatcaatcagttctgctctttgctcatctggaagagcgtaataatcttctaccgtatactctccttgccgcttcactgtatatgctgcacttgcatcctttacaacagatgcataataccgttcccgttccatcggcaaaaaaattttttccaaagccttcaatgtatcataacgaggtgaagttgtcgtacctccaaaaatcttctgcacggttccaagtggtaccccggaaaactccgcaatctgttcattggtgtatcctttttcctttttcttttctttcatttcttgaatattcatggcgcacactcctttataacaagcctggttatacacctttttttagaagtaatacttatttcttagtatatatactatcacatattccatttatattcaatcattttcaatccatttttaatccattttaaatccatttcatcaatctacatccaatatccggaaatgattccgcttcacttcgatcagcccgtccttctgcattttccccagttcattcgacattgccgaccggtctactccaaggtaatctgcaagctgctgcctgttatacggaatatcgaactcttccttttcacgctccattgcctgataagacagataagacaatagtctgccacggatcgtcttcgatgaagtgtgaaagatgcgtctggacagattcaggttcttctgcgccgatatcgcaagcaagttctgcaccagattctgatgaaactcacacgcattcggacacacttttaagatctttctcacatccagaaataacacttcgcagtcagacatcgcaattacattgaccatcagcttctcatccagtgcacaggcatacgtctctgcgaaaatctgaccttcttttacataatccaggacacttctgtttccccagatatcatcgttttcaatcagggcatttccttttaacataacaccgatcgatgagacaatatcccccgcatgaaagatgatctcatctttctggtatttcttcttcttcgcacttaagcaattcagcatagaagatacttcttcttccgttgcccctgcgaagatttctgtctttgttaatgcttttaaattcacgctttccatttttgtttcctctctacatcatcgtctgatacagaagcaccataagcggcatcgttatgatcgataacaatgtcgtcataacattgatcgcactggcatatttcgaatcatttccatacacctgacacatctgcgtgatcgttgaagcagacggtgtgatcaccgcaaggaatacgatcaacagtaatttttttccatccggatgtatgttcacaagcccgcttatttttaaaattgccaatgatatcaccggtatcacgaccagtctcagaaatgaaataaaatacacttttacattttcaaatatattcctaagattcatctctgcgatcagcattcccgttacgatcatactcgccggaccgatcatactgcccacagaactcaatgactgatctacgatttccggcagtctgatctttgtaaaaaataatacaactcctgcaaataccgaaatcatatttacattaaagacaatctttttccagtcccactttccttcccggctgatcgtattcttgccatgtgtccacagaaataccagttggacactcatgaacacacaaccatataatacccattcttttcccagaataaaagtcaccagcggtacgatcaaattacccgaatttgaataatagatggatgtcgcctctacttcatttagtttcaatacctttccggcaccccatactgctgccagtaatataacctgtaataataccgacgctacaaataccagcaaaagttccttcaccttttcacttgtataatccacctgaaatgcattgatgatcacacacggaataactagatataatacaattttagaaatgactttgctgtcttctccctttaacaatcctgtctttacaataatatatcccatcaggatcataagaaacagttctgcgatctgttccattaaaagtatactgatttccataataatctctctttccttttacagtctaccgaaaatcatatacactttcctgttgattgtcaatcttcggaagcctctgcagccttctattacccctacttataccagcgtgctatttatcaatcatatattgattccttctatctataaggctataatagtgtttataataatataaaacaggcagaaaaaatgcagggaggaacttgagatgaaatacaagaatattatttttgactttggaaatgtaatcggaaaatttaaaggagactatatcctgggaaaatttgcttctacaccggaagattataatattcttgctgatgccatcttcaaaaactgggcagctttagatgccggaaccatcgactatgaccagaatgcagaagatacaattgcagaacttccggaccgtctgaaagatactgcccgcgatttcttcgagaactggttccagtatgtcgatccgcttcctgaaacatgggaattcatcaaagagttaaaagcccggggagttccgatctatctgctttccaacgcttctaccaggtttgcagaacgtgcaccggaagattatccgattctgaaagaattcgatggcatcgtcttctctgcacctctaaagatggcaaagccgggacacgatatttattaccatctgttcaataaatatgaccttctaccaagtgaatgcttcttcatcgatgatacggtggaaaatgtcattgcaagtaaagaacttggaatggagagcatcttgtttacgggagatattgaggccgttaaaagggcaattgagttttaatcaattgcccttttttaataaacgctttaccattgccgcaaccatattgacggctgtcgacaccgcaccgagaatgatcagaactgaaatgagaggtgtcataaatccacttccggatgttatgtaaaaaaacacttgatttttagcttttcgttcggtataattcatattcggacaaaaaaataagataattttggtttaattggaaacgacacaagtgtatgcttgactaacgaacaacacaagtgtcttttttgtacccatttttaaatatttacataaaaaggagaacaaaaattatgccaaaaaatctatttcaaaacgttatttttacattaatgatgtcatttctgatggtatacgtcatgatctgctacaatatttgcctgaatgtgggaggaatgagcaacgaagtattcctgatggctttcggcgaactgaaaatcatgtggccggttgccttcgttctggaatttgctttcgttgacaaacttgcacatatgcttgccttccgtatcgttacaccacaggacagaccaatcttcatcactcttgcaatctcttccatgatcgtatgcatcatgtgtccttgcatgagtcttgttgcaacgattctgttcaagaacgcaggaagtaatgtgattgctacctggtgtcagacaacattcatgaacttcccagttgctttcttctggcagatcttctactgcggaccattcatccgtctgatcttcagaaagatgtttcctgagaaagaaaacgcttccgctgtaaccgaataattgatacaaaaaaccgagcctgtttctatacagtgcccggtttttctttcttcttattctgttcttcctgtctatacaaaaagcaatgctatattcagccctgttacaatcacagcaatcaccagaagcaaaaaattcaaacgtctgctgttcacatattttcccattacctttttcgaagccgtcagatatatctgtgtaaatattgtaactggaagctggacggcaagcagcatctgggaatataccagaccttcgaatggctgtctgataaacaggatgatcaccgccgccggaatcatcgtcagcaggactcctctttttgtttcctttgtcttaatatcatatggctggttaaagattccggaaaatatcgttcccccggccattcctgcagtgatactggatgagatacccgccagcaaaagtgccagtgcgaagaccaccgttgccgcatttcccaacaaaggcgacagcatctttcccgcaacagtcagatcatccacctgttttccacttccgttctgataaagcgtcgctgccgccatcaggatcatcgcactgttgattgcccatccaatgatcatggaaaataatgtatctttaaattcatacttcaactgctgctcgatcaccgaactgtcttccagattccactgtctgctctgaataatctccgaatgcagaaacagattatgcggcatcaccaccgcccctaatacgcttaagatcaccggcatgcttcccgacgggaatgacggtttcacccatccgaccacagctgctccccagtcgatcttcgcaattccaacttcgaataaaaaagaaaatccaatcagcgacacgaatagtatgatcagtttttctattctcttatatgcattcgtaaatgcacagaataataccagaaccaggatcaggatactccccagtctgattggtatatggaacaacatctgcagcgcaatcgctcctccgagtatctctgccatcgccgttgctaccgccgcaaacattgcagtcagaagtatcaggtcttttaacagccttggcatatatctgctcgccgcttccgacagacacagtccggttgcaattcccagatgtgccgcgttatgctgcagtacgatcagcataactgtagataatgtcaccatccataataactcatatccgaaacctgatcccgccgcaatattcgaagcccagtttcccggatctatgaatccaactgtaaccagaagccccggccccagatagcgcaggaaattaagtgtcttattcttggattgattcttggatttccgcttcatatataatgaactcctttacttagtagaatctaagttagttataactaacttagattctactaagcattttcatctttgtcaattcattatatgaatatcatttctcatttagaagcaaaacgctgaaaaatccgtcctcacaggttaaatagctcttgtgtatttcttcagccactcctgctcttcctcgttcaggtaaggagcaatcacttcgtatacttttgcatgataatcattcaacagtttcttgtcttcctgtgtcataatatccggattgatcgcatcaagatccattggaatcagggtgattgcttcgaagtacatgaactgaccatattcattcaatgttcctttgcaggtcaacagttcgttctccagacggattccgtgagatccttcgatatagattccaggctcatctgtgatgaccatgccttcctgtaatacttctgtctcacccttacgatatttccagcggaaacctgcaggtccttcgtggatgttcagaaggtatccgactccgtgtcctgtaccatggttgaagtttaagtctctgtcccagaatggttttcttgcaaggatgtcaagaatcataccggtagatccttccaggaattttgcactgccaagctgtaagttactgatagcaaccaatgtgaagtgatctttcatgatctgcggaatttcgccgagtgcgtaagttctggttacatctgtggaaccttcatagaatccagctcctgtatccgttaagaataactgtccttcttttaactctacatctgtctccggtgaagatgtatagtgtacgatcgcaccatgctctccaaatgaagagattggttcaaagcttggacggataaagttgcccatctcagcacggaattcatccaatttatcagatgcgctcatctctgtgatcttcatcttgccaacattttctttcagccatttcatgaatcttacatgcgcaacactgtctttgatctgtgccttgcggatgttctcgatctcaaccgggttcttgatcgctttcatgagaattgccggatttctcttttctactgtcttaacattttcaggaatgttgttgaacaatgcataattcagttttccaggatcgatcattgcaaccacatcactgccgaatttcttcacatcttcgtaaatgtcgttgtatggatgtaagtttacgccgtcttttgcaagcttggcttttaactcgtcatctaattttctctcatcaatatacagctcgaaactgtccattgtgatgattccgtaagataataccagtgggaagaagtctatatcatttccacggatatttaacgtccagcagatgtcgtcgatcgtagatacaacgtgcacattggttcctgcttctttcatctcttcacggattcttgcaagtttgcttgcaacagtttctccggcatattttacatccaggtcaaatgcaggctcttcggataataccgggcggtcttcccagatctcatcgattaagtctacctgataatttacttttgcattcttcttcctagcgatggctgcataaccttctccttcaccgacagatacgactcttccgtcgaatccaagtgtctctccttcctttaatacctcttcaatatatgcattcatctctggcacaccaggctcacccattttcataagttctacagttgtccccttcaactgtgctgctgcctggatgaagtaacgtccgtctgtccagagtcttgcttctgtctttgtgatcacggccgttcccgctgatccagagaaccctgtaatgaactttctcgctttgaaatgttccccaacatattcgctctgatgaaagtctgcagtcggtactacatacacatcaatgttcttttcttccatacacttacgaagtgcggaaagtctttctggtactgtcatgtttttgttcctccttgatatatacagtgtattgttattataacgcatttcttatcattaatcttctattaaatcagataatttttcttatctttcataagtaatacttcttttgaatggatgacaaaaaaaagactttgaaatagatttttccgaatcccttttaaagtcttttttgctaatattattctatttatttttatatccgtcctgcttttccaagttccaccatcaccggtgtaagccctgcaacatcccagccttcaaaactgatcatacataatgcacggaataataacttcaccgtctcagattcttctgtctgatctgcatgatacaattttgctgcagtctggcagattaccatcaggattgtattcttaaatgctccgatttcttcggattctttccacagattctccatatcatagtcatccgtattgccacatggcgctgcacatgttacacatcccggtgagactgtatatttttcatttcttaccttttctaacatctcactcatatcaaagatacttgccgaccagtctccggccaccgtcagtgcttctaggaatacccggttagtgttctctgtcttttcgttattctcacaggttcttgcaagtccgatgactgcccctgtcagtttctgtctgatctcttctttcacgatttacctctctttctttgccggaatcacaaagataaatatcatagaactcacaaataataaaaacggataaaaaagcttcggcatgatctgaaatgctgacacattatatcccagttcactcgccgcagatatcgcaaccagcatctgtgctccataaggaatgatcccctgaaaaacacatgaaaatgtatccagtatcgaagctgcttttctcggtgtgatcccatattcttccgccatatcctttgcgatcggattcgccattacgatcgccacagtattattcgccgttgcaatatccatcgttcctaccagaagtcccatgccgagctgaccacctttgcgtcctttgaataccttatggattcccgccagcaatgcatcgaaaccgctatattcacggatcagtgcacacatcgctgccaccaggattgccaccatactcgtctcgaacatcccggaagctccggaacccatattggcaagcagatctgtcgccgcaatgtgaccgccggccagcataataatagaaccagatacaatcccgatcagaagtaccatgaatacattgatcccgataattcctcctatgagaaccagtacatatggaataatctgcactaagttataactcttacttacccgtcctgcaatatccgtctgaaatgaaagaaccaggatcaataccagggttgcaatcgctgccggaagtgcaattccaaagttctcccgaaatttatccttcatctggcatccctgtccgttgcatgccgcaatcgttgtatccgagataaatgaaagattatcaccaaacatcgaaccgcccataaccgagccgatacaaagtgccatatcaaatccagatgccttggatacggacactgcgatcggcgtgatcaatgtaattgtcccaaccgacgttcccatggcaaccgacacaaaacaggctaccacaaataataccgcaactgaaaatcttgccggaatcagtgacaacatgaaatatgccacactttccgcactgcttcttcctaccactccgacaaatgcccccgctgtcaggaagattagaagcattgtaataatattcttatccgcaagtccctgtgccataatttccagtttctcgtcaaaactcaccttacgattctgcagacacgccaccagaattgccgcaagaaatgcgataatgatcgggacattatagaatcccatcggaatcttcatcacatattcgaataaaattccaagtcccagatagatacacaaaaatacgccgattggcagtaatgctattgcatttccttttttcattctttatcctctcattctttccaataaacttttatgaacatttcttgatcttccttcggctttttctacccgattcctccaagtacaattccaagaattaacacaataaaacataccggaacataaaaatatttacataccgtatgataccatgatacatatggtttctctctcccggtattgacctgtttttccacaaatgccttgccacatacccagaagaacatgattcccgcaagtccggctccgagcggacagatatagatagacagtacgtccatccagtctgatacaatcccctggatcaggagtgacacgaccactcccacgatccccgtaagtgcacatgccggaactcttccaagctttaacttctcctgcactgtagcaatcggagcctcgtacagattgatcagcgaagtcatacctgcaagcaatactgcgacaaagaagatgatcgcgatcagccatcccccaggcattcctttgatcagattcggaaggaagataaagagaagtccgggacctccctgatccaactgcgctcccgttgttgccatcgccggaatgataacgagtgcggcaagaattgctgcaatcgtatcaaataatgcaactcttcctgcagaagccggaatgtcctcttcatccgaaagataagatccatagatcaatgttccatttcctgctaccgacagggaaaagaatgcctgaccaagtgcaaagatccacgttgccggatctttgaatgcctctggatctactctgaaaatataacggtatccttcacttgctcccggctggaatccgacatagattcccagaatcacgaacaatgcgaagaatatcggcatcatgatcttatttgctttttcaatgccgcttccgacacctaacatcagaatcagcatacaggccacaagcgcaagtatctgccatatattattaccaaatgctgacgccatcttaccaaatgccgccccgaattcatccacattttcaggcgaaagtgttgctcctgtaaatgttccaacggcatatcttaggatccaccccattacaaccgtatatccgatcgccatggcaagtgatccgaatacagggatcatccccagtgcttctccgacttttctctttccttttttctcacaggcaattccaaatgcatcgattggaccggcctttgccgcacgcccaaaactcatctccccgatcactcccgtcgaaccgatcagtattacaaatataaaatatggtatcagaaatgaaccgcctccatacaatgatactcttgttgggaacatccagatatttcccataccgaccgctgaaccgatacaggcacagataaatccccatctgctgctaaatgattctcttttattcataattttccctctccagccattagggacggggtttttggtctttttactgtccctgccggctcaaaatattccatacacatggtagatttctctattttagcatgattgctataaaaacgtcaaaaaaaaggggatataaacttatccccttagtgtcgccaccatccttttcggcattgcaagcacatccagtgcttcctctatcgatctggtacagatatcaacatttgcaatcagtcttccatacgcaccttccgcctctataattccaacactgagttctgctatcctgcacataggcaggtcattccgtccgtttcctactgcaatacaccgttttccacccagttgctctatgatttttcttttttcttctgctgccgcattaccaggaaatgtctgtatctttaacggtagtccttcacatatctttctcgcagttccatgtgtatctgctgtcagaacataaatctcatatattccacttagctttttcagccgttcctttacactttcgggtattatgccgtctttcgcaatagttccgttataatccagaatcagatatttcagatccatcgttttatatccgggaatttctattctcatacgttctcctttactcttacatatactgtatctgctctcttgcaggttcggatgacggatgctcaaagaatgtctttgtgtctgtcacttccagtactcttccctgatccataaagataatctgatctgcaattctttttgcctgtgccagattatgtgttacgatcacaaatgtatattttccctttaattccagaagtgtctcttctatcgcaatggtattcttcatatcaagcgcagaacacggctcatccaacagcagaatttccggattcacacacaaacttcttgctatggcaagacgctgtttctgtccaccggataatttttttgcagacttcttcagttggtcttttatttcatcatatagtcttgctttctgcagacactctctggtgatccgctctatttctctggcttctctaattccatgatatttcaggacgtatgacagattcttctctatactgtacggaaatgcgatcggctgttgaaataccattccgattctggttcttaatacttccgttgaaagtcctttaatgtcttcgccgtcaagaatgatctttcctttataaaagccgccctcctcttctatcattcggtttaatgtctttaaaaatgttgtttttccacagccggattgtcctacgattgccgtaatctttccttccggtatcgtaagactgatatcatgcaatatctcctgtctgccgaatccacaacttatctgttctatcgttaacatatcagtaatcctttcgtatataagtaatacatttacatatgatctgtatgagcagtaagaataacatcagtacgaacgccgttccatatgcataatccagagaaaatccattatttaccagcatatacagatgatacggcaatgacataaatggatccgtaagttttcccggaacatctgcgaccataaccgcacccgtatacaaaatcggtgcaaccgctcccattccgtatgccattccaagcgccaccgttccaagcaattccactgcacagaccggaagaattaatcgtatgaccgcatattctctggacattccaagtgccagtgaattcttcatgtattctgttcccttttctttcagtatcttttctgcacggattgcaataaacggcacgatcataacagccacacaaatagctgaacataagagacttcttcccagaccaaactgatagatcaacaatgtatagccgaccagtccgaacagaatagaaggaattccggacagtcctgtaatgcaggcactgatcacatggtaaaatatacttttccttgtataaaacacaagataaacagccacaccgattccgatgattccccccatgagtgccgaaagtgcgccaagatagatagatcccatcagtgccggatagattccacctgctgttccaagcggtacccccgccggcttatccagaataaacgaaagactcatcacattctttcccttccagaagatatacaggaataagaacaacgtcactgcaattgtaagaattccaaggatccctgccaggatgcgtatcacatactttgtcagtttatttttcatgttctgcaaacctcctcttcaacaactgccctgccagtgtcactacaacaagtatcacaagcagcacaagatttgccacataaagcaccgacagatgtatacttccgtattcaatgcttcccatctcaagagctgtcagcgccggaagcgtctgcccgcgtcccaacagcttcgggaaaattgcagaattaccgatcaccatcattactgccatcgtctccccaagcgcacgtccaaatgccatcatcgcacttgctacaattcccggccggattgccggaagtatcactttgatcaacacatattctcttgataagccaagtgccagtccggatttttcatatgtccgttttgcatttactagtgattcctgacatgtcgatacaacatacggcagaagcatgattcccagtacaatacctgccaccagtacacactgtcccgctgccatcttcagatattttacaaatgcttttaccagtacggttaatccgataaagccaaagattaccgatggaatacctgctaccagatctataaaggccaggcagacagatgcaagtttctttggcatgaaaaaagtaagaaagcaggcacatgccactcccaatatcatcgcaaacagtactgccagtccggacacatacaaagtacctgtaacagccgggagaagaccatactgcggagccgcacttaccggacgccattccgatgacggcagaaacattttgattcctacttctcttaatgccggaatactttccttcaaaatatgtatcagcataatccccatcagtgccgctaccacaaaagcaatcatatatatcaagactttacaaaatgtatttgctatttttctgtacataacaaagtcctttcttgcatactttggtaaaaaaaaggatgtatctatacgacacaccctttttcatatttttctatttcattggaatgaatcccatatcttctacagtcttttgtcctgtctctccaaggataacatccaggaatgcctgctgaacatctgtcggatcccctgaaccaacgatcaaaagtggtctctggataatataagaaccatcaatgatattttcttttgtcggctctacaccatttaccttcagagtaactactttaccggcgttctgatttgcaacaccaaatgatgcatatccgattgcatatttgttatcaatgatatcctgtaccagttctcccatagaagatgcctgaattgcttcgctggatacctctgtatcacccatgatgttcttctggaatacttcatgtgccccaccattgatatcacgtgtgatcactacaaccttttcatcaggaagagaaggatcaagatccttccatgttgcatatttacctgagaataatgaaacgatctgctctgttgaaagatcatccagaacacctgttacagggttttcaggattaacagcgattgttaatgcatcaatacctacctgatattctttttcgtctttaattgcttctttttcctcatcttttacacttcttgccaccataccaaatgtagaagttccatcgatgactgcttttgttccctgtccggatccacctgctgatacatagatggcaatgtcttcttttggaagtgatgaatcatatgcatcccatgttccatatgtgtcgaagaaatctgtcgcaatcgatgtaataaccggtgctaatgtagatgatccgttaaataagatctggttactctctgttttcttctctgtgctctctgtcttctttgtatccccagagtcagaagatgcctttttgtctgatccacatcctacagccattgatgcaaccatggctgccgcaagaaggacagacatcaatttctttttcatagatatttttcctcccattaataaattttatctatattgaatagtatagacttgaatccaattattttcaagttaataatgcctataagtgcatccacttataggcattatcaatatatttatgtaagttttttcggaattttgccttactctttcaattctaccttaaattgcatccaacgcattcgaaatatctgcaatcagatcctctttatcttccagaccaagactgatacgaatcagttcagccggtactcctgcttctttcaactgttcatccgtcatctgtctgtgtgtagacgttgccggattcagacaacaggttcttgcatctgctacatgcgtctcgatcgcaccaagctttaatgtcttcatgaagatagatgctgcttctcttccaccttttaatccaaacgataccactccacatccgccgtttggaagatatttctgtgctctttcataatatttattagaaggaagtccggaatagttcacatatgctacctttggatgtgcttccaggaactctgcaactgcctgcccgttctctacgtgcttcggcatacgtacatgcagggattccagaccaaggtttaagataaatgcattctgtggtgactgcatagatccaaagtctcgcatcagttgagccgtacatttggtaatgaatgcaccttctttgccgaatttctccgcatatgtaattccatgatagctttcatcaggtgtgcaaagtcccggatatttgtctgcatgtgccatccagtcaaactttccgctgtctacgattgcaccgccaagtgcagctccgtgtccgtccatatattttgtagtcgaatgagttacaatatctgctccccattcaaacggcctgcagttgaccggtgtcgggaatgtgttatctacgataagcggcacaccatgtgcatgtgccactttggcaaataattcaatatccagtacggtaagtgccggattggcaattgtctcaccaaacattacttttgtatttggcttaaatgcttcatttaactcttcttctgttgcatccggtgacacgaatgttacatcgattcccatctttctcatcgttacatcgatcaggttaaatgttccaccgtaaatggatgaagatgctacaatgtgatctccgcactcacagatattgaacagtgcgaagaaattggctgcctgtccggatgaagtcagcatcgctgccgttccaccttccatctctgcaatctttgccgcaaccatatcattagtcggattctgcaatctggaataaaaatatcctgacgcttccagatcaaataattttcccatatcttcactggttgcatatttgaatgttgttgactgtacgatcggaatctgtcttggttctccgtttcccggagtatatccgccctgtacacattttgttcctattctgtattcattcatgaattttcctccttagtgcatgttttttcacgcactcgctaaatcatacctttttagtatactttagcactataccgaggaaatttcaaggaaagataataagactaatttatcgtcttctcaaatcatacaatgggttcttgccgaagaacatgggaataaagaaaaaactgccaaacgtcttggcataagcagaagcactctctggagaatgttgaaaaaataaaaaaagaatcacaaacggaagaggatgaagtaatacgcccctcgtctaattaacagggaacatattacttcatcctcttccacctgtgattctttttatttcatattcatattatttactcgatcgcatccgtctcaatcacaaattttacattaccatccattgctttatctttaccgctgaatgtactatatttgcaattttctgatgtcagtacatcgattctgtcaagtacatcaccaagttcatcttccacggtgctcttcaacttgcttgttccttctttgtcaaatttcgccatgccttctgcaagttcttttgcacctgactgaagttcggaagctccgcttctaagtgcaccgctgttggctgcaagtgttgcagatccggaagacatctggcttcccagtgtgttcagtccgcttgccaactgattggttccactctttaaagtattcacaccggctaccagtgtcgggctgttagatctcagtttgtttgcacctcctactaaggaatcattatatccacttaactgtgcgaatcctttattcaatgctgtgattccccggattgctgtcgggaactgagcggatgttgcattattcaatgttgccagattgctgtgcagtgttccgatcgcactgttcagtccctgcatacctgcatttaactgatctacacttcctgtcagtgtacttaactgtcctgcctgtgcaagaacaccttctgcatcttcgatactcttcaactgttttttcaattccggaagagcttttgacaatgcttccgaagatttctgcaatgtagctgcatttgtcatgatcgttgcagcaccggcttttaatgaatctacatctattgtcggcatctttgtagtatcaatgcctgttaactctttgagattctgtacggaatctgtggaagcttttgcgctcttcagtgcaatgatcgaactctgtaattgttttgcttcttcggaattcttatctgagattcctgcatactttgcttccagtgtttttatggatgttgcaatagaatcggaactgttcttcgctgctgtctttgcagccttaatcgtctgattatcagaagcaactacctcattgatattcttgcatgcattctgtaatgctgtctgagctgcatctatatttttcaaggattcctgcatactctgtaatgtctggccgattgttgtaagtggtttttcgataccttccgtaagtgttccgcttaatgtcttcgtctctttcatcagcgtatttccggttgttaccatagaatttacctgagacatcagactctttacttcttctgttccaagtgctgctttcatctgtgcagttcctgccgccagtgctttggatgctgcctgaaggtcttctgtcgttgcacccttaccatctgttgcagcttcaagctgtgagatagcgctttgtacctgcttcagtcctgtacttaactgtgtcagctgtgaagctccggctgccagctgcttctcgccgtctacataactgctcacaccgtctgcaagtgtattcacaccacttgtataatcctgtacacctttgacaactttgtttacaccattcacatactctgtgacgctgccattcagctctccgttagaaccaaggtatttctggatgccggcgttcaatgtatcaacgccttctgtatagctgttcacaccatctgcaagtgttcctgctccatctgcaagtgtatcggaaccacttactaactgaagtgccgcatcctccagatcatccagagcgttctgaagatcatctacatttacgatactgtccatatccacatcatctaacagatcagataatgcaacagtataagtagaagacattgtaaaatcttttacatctgcttcaatacttaagctttccggaatcgtaactttgtcactttcttcactgcttaagttcaggctgtcttttaatcccggcattccgaatccgaccacgatattcttatttccatcggaaataatcttgccgttatcaatcgttacattgctgaatgtctcattcggaagtatcatacctgtcatcatgacgaatggtgtacatacttctgtatcttttccgtctacagatacattcttcttttcattattcttataatccactgtgatcttcaggtgtccgctctttccttttaactcagatggtttcatctcttttccatccaggtaatattttaatttaacagataccggaagtttcttatctgtcgttccctgataatagatgtcctcaccgtctgtagcccaggtcagtttatctccatctgacgtatatttttcatcaccttttacattcttgatatcgctcagtgtactctcgtcttccagatctccggatacacttcctgaattcttaagccagttggataccgttactttatctgtcttgccgcttgctttagcattcacatataccgtctcttctttatatacctcgctgttcgaagttccatttgctgcgaaagctggtgtcacacccatcatcactgacattccgactgctacagatgctgcaatttttcgtttcatttttctgttcttattcataattcctgcttcctttcttaattatcatggattgttaataacaggttactttgcttcacttgtctgtgcttttgcctttttcccaagaaatccgatggatgtcttgcagattaatttgtcaaatatcatgaacattgccggcaataccagaagcacgactaccatactgataatggctcctcttgcaagcaatgtacaaatcgaaccgatcatttcaacctgagaatagcaggcaactccgaatgttgcagcaaagaagctaagtccactgctgatgatggacggcatactcgttttatgtgcaatgctgattgcttccatcttatcttttccacggcttcgttctttctgatatcttgtcgtcatcaggattgcatagtcaacggttgctcctaactggatcgcaccgataacgatacttgccacgaacggaaggctgactccctgatagtacgggattgccatattgatcatgatcgcaaattcaataaccgctaccaggattaccggcagtgagattgatttgaaaatgatcagaatgattacaaatatagctgcgatcgagataatatttacattaaccagatcaacatctgtaacatcctgcaggtctttcatcaaaggtgcctctccgatgaccattcccgacttatcgtaggattttacgatcttatctatctttttgatctgtgtatttaccggatctgttgcggattcatatttcgtactgacgaatgccagttcataatccttactctgcatcatcttacggacatcctttgggatcatggaatccggtacgctaggaccgatcagtgaactcatgctgatggtccattttacaccttttactttatcgatcttcttgaacatctgctgcttatctttggcactcatgttcttatccatcatgacgatgtgcatgttacttgtaccaaagtcatcttttacttttttgatcgatacattactgttcagtgttgcaggaagtgaatctgcaatgttgtagtagatctttgtatgattattaccgtaaattgcaggaagtaataatacaagaaatgctacgatccatactttataatgctttgtgataaaagcggatggacgatccatgttgcttaacagtaatttgtgtcttgtcttttcaatcggcttatcaaatacaaggatcagtgccggcaggatcgttacacaacagataacgccgatcacaacacctttcgccattacaataccaaggtcacgtccgagtgcaaatgtcataacacacagtgcgatgaatccggctacggtagtaacggaacttccgactactgatttgaatgtgttagcaatcgcatgccccatggctctttctttctcgccagggaatctcttcttattctcttcataactattcagaaggaagatggaataatccatcgttacaccaagctgcaggactgctgtcaatgcctgtgtgatataagaagtttcaccaagtataatattacttccaaggttatacagaatcgcaagtccgatacttaacaggaacagaaacggaacaacaaatgatcctgatgtaatctccagaactaccagactcagaagtgctgcaattactacatagattggaagttctttcattgcaatgttcttaatatctgtaacgatacctgtcataccgctgatgaaacactgtttattcgcaatcttacgaagctgtgtcagtgcctccatggaattatcggatgatgtcgtatcatcgaacaataccagcatcatcgtggcatctccattgataaacgcttttctgatatcttttgggatcatctcagtcggaagactgatatctgccacatcgtcataccagagtacatcctgtacatgtggcactttctcaaattctttttccagcttctgtacatccttcatatccatattctcgactgcgaccatggagaatgcacccattccaaattcatctaccagtatatcctgtccttttaccgtctccaggtgatccggcaggtaactcagcaggtcataatttacttttgtctttgcgatgccgattactgacggaataattaataagactcctataagcagcatcagtattctgtgtcgggcaatccatttgccaactttgaccattctttccatctcctcttattttctttatgcatttattattataatcaagaatgaccagtagtcaatattttatttaaattatttttttatttcgttgataatctttatccttattggcgcacacaaaaaaaagaaacagcacatcccgtgttgtttcttttttgtttctattctataatttattgcttcacacattccgagagcagcttaatgtgctgctgcctctgcatttccggcaactttttcttttcgtttgtcatgcattgcaaataatccggctaacagagttcctgagatggaatgccatgtacaggataccgcacagataattgcagattccggtgtagatgcaaactgggcagttgtagttgcaagattcgttgcaagtccggcattctgcatacctacttcgatagaaatggttctcttctttgacgtattcataccaaccagttttcctgctccatatccaagcagatatccaagtccgttgtgcagtaatactgctacgaagatcacaacacctgactggaagaacttggctccctgtgaagataccacaccgccgacaacacatgcaagtccgagaacagcaactcccggcataactttctgaagttcccggaatgttttattctttcccaacagataatttaataaaaatccaacaccaaccggaaggataacagtctcaatgattgatacgaacatcggaagtcccttgatcgtaatctgtgtaccgcttgccagtaaagataccatgagtggtgtcataaccggtgagaccaatgtggatactgttgtcattcctacggaaaaggctacatccccgccgcacagataagacatgatgttggaagatacacctcccggacagcagcctacaagaatcagcccaagtgcgattccatccggcagattcaatacctttgaaagcgcaaatgcaaggaatggcatgatcagatactgcgcaaccgcaccaacacaaatgtcaaacggacgctgtgcaagaatcctaaaatcttccgttgtaagtgtcagtcccatactgaacatgataataccaatgataatagactgacatgtgaacttgttcgataccatgtctgtgaacagtgccagatttacccagcccatcatagacggaaggaaaaatgtaaccactgcgattgcgattacaacaattgacgtgtagtctgataaaaatttgcttactttttgtaatgctttcattactcttctcctcctttaagcaatcactgtccaccaaaaaaaatccctttccagaatatactctgaaaagggacgaaatctatccgcgttaccaccctaattctgtagaatctttctacagctctcatacacgtactaacatacatgctccctgtaacgggggataccggcgaggtttactttgatattgctttcaacccgcttcttagagaggatatccttatctgcttattacctgcttccaccaaccgcaggctctctgtgaaataacgatagatacggcattgttctcatcaacgaatttcggtgaactatatgtgttttttacaagtccttattataaacctgtcatttcaaatgtcaagtataatttttcataattttgcatattttttcatctcatcttgcaaaatactccttgccttcccggatttttactctccgatccttggaagattccatctgtaatgagccgcaagaaaacgtatcagcataacgatcagtgatgacaccaccatcgccggaagttctccgtaacttctgtatatgatcacacatatccacgcccccgcaatggatgcgcatgcataaatatgtttcacaaatatatacggcgcaactcctgccatcgtatcacgcaagagtcctcctccgactcccgtcattgtaccaaggaagaccagcagaaatgtattatcgatatagccgcagctgataccttttgtcactcccatcgccgaaaagattccaagtcctacagaatccattgccaacataagtttatcatagacctcaccaaaaccatcctgcagatatttcctgcggaaatatataatacaaaacacaagcaccgcagcaagtacggcatagatcacatataccggatgcagaagtgccgatggcaccttcccaagtataacatcacgaaccatacctccgccaactgccgttgacacaccaagcacgatcactccgaatatatccatgctgcactcaattccaaccattgcccccgatgctgagaacgctactgttccgatcagttcgattgcaaatataatccactcctgaatatccatcttgttttccccatcttgtcttttattttttgtaaatttactgttctgttcatgctctgtcattctatttccgaaggtcttccagcatctctctgaccgtcttcccatacaccggatgacgtttataaggtgcaatctcatgcaaaggctccagtacaaacgctctcttatgcatctccacatgtggaatacataaagtatccgtctctgcaaccagatcgtcatagaatataatatccaaatccagtgttctcggtccccaatgtatgattcgttctcttcctgcctctttttcaattcggttcagctcttttaataactcttccggatataataatgtcgaaagcttcagacaaccgtttaagaaatccggctgatccgtcactccgtacggaggtgtcgtgataaatgtcgataccttctccacctttgtattcttcatctcatccagcgcctgtaccgcggcttccaaaatgcttctgctatcccccatattcgatccgagcgcaatatatgccgtatgccattcacgctcaatctctacactgaccgtcttaagcggcagtccgaccggtgcccacggtttcttgatctcaatctgcaccttctgcagacctgctatacgcaccagcatctcctctgccagtccttccgcaaccttctccagaagcttaaacgtatgacttttcaaatactctgtgataaatgcacttgcttctccataatggatagatgcagtcagctcatctgtcagtcctgcccgtctggtatccgtatacataaccgcagacaccacaaatttctgccccagtacattttcctccggaaacacaccatgattggcaaatacttccagatcttctatctttatcttgtccggtttcatctcattcctcactctttctatacttcgtgtccccgcatgattgctttcgtcatctgaatggctctcttatttttctctacatcatggacgcgtacgaatgcacatcccttctgtaccccatatacggtcgtaaccatcgtaccttcttcccgctgcgtcaccggaagatccagcgtcagtccgattacggattttcgtgatgttccgagcaataccggatatccaagttcatttaatatctccatcttatcgataatctccaggttcatctcataagtctttccaaatccgacaccagggtcaaggatgatcttgtcatcctcaatgcctgctgcttttgcaagtcttacacattctttcatatcatccatgaaatctttcagaaagtcctgatattccgccttttcccgattatgcatcagacagcatgcagcctgatactttgcgatcacacttgccatcttcttgtcatattttaatccccagatgtcattgacaagatctgcacctgcctgaagtgcagcctctgctacatggcttttgtaggtatcgatcgacaccggtacatcaaattctttcttaagcacttcaataattggcgtcactcttgcaatctcttcttcatccgtgatctggatatgtcccggacgcgtagattccccgcctacgtcaatgatatctacaccttcttcaaccatctggtgtgcatgtgcaattgccgcatccattccgttaaactttcctccatcggaaaaggaatccggcgtcacattcaggattcccataatgtatgtatgatttgctgtatcaaaattctttccacctatgatcatattattatctccatatttttctcttcttcattccagttacacttcttctctgccatgcaggaaagacacattctggaacgtttatcactttcatagaacagttcctctatcggcttcatatgctcatgccgtctgcggtgtcccctgactgccagacagatcagtgctttttcttcatccgtaaatgtaaaaccagtcggaagagaatccaatatccgccttgctattctctctcctgcgatctcatgcggaatctgctgtctgtactgaaaagatttgccaatatcatgcagcaccgccgctacgtagatcagttccttatcgaatccaagtccttcttccagattcttaatgtaagcaattcttgccacatccagaagatggttcatctgatgacaacagaataccctatccgtctcacattcacagatacgcttatagtatgtctgatacacttcatgattcaccaccgcattcagacggggcatccctttttgtctttctgttactcttttcatctacatctgtatctctttctttttatcgtccaagcatccggaaaaatctctcttccagtaccagatctgtctcaaatacaccgcgtcttgcaattgtcacagtctggcttcccggcttcttgatcccacgcattgtcatacacatatgctctgcttcgattataacgatagcccctttcggctgcatatactccatcaaagcatcagcaatctgtccggtaagctgttcctgaagctgcagtcttcttgcgaatacctccacggtacgagcaagtttgcttaatcctacaactttcccatccggaatatacgcaatatgtgctttcccataaaatggcaggaggtgatgctcacatgtcgaatagaatgtaatatctttctctattaccatctcatgactgtcaacggtaaatgtcttagaaagatgttttcctgcatcctcatccatacctccatatatctcttcatacattcttgcgatccggtccggtgtatcaatcagtccttcccggttcacatcttctcccattccttccagaagcagccgcactgcctgttctatcttctcatgatctatcatattctttcctttctctgcggattctgtacgcatccttccatacaccggattacttcacttagatatgacaatgaaccacatgcgatcaccgcgcgtttcccactgtcttctgttgcataagtgtacgcttttgcaacagcatctccaatactcttttctgcgtacacgctcaactgttctgtcatacagtctcttacacattctgcaagcttctctgccggcagtgtacgttccttattcggcaaatctaccgtatacacccgctttgctgacggacacagaatctgtacaatcttctcatattctttatctttaaatacacccatgatcaggataagttcctctcccgtaaaataccgttcaatggatgtcctaagcttcttcgccgcatcttcattatgcgcaccatctacgatcacaatcggatcttcagacagacaagtaaaacgtcccgcccatcttgttgcatcaagaccgtccctcactgctccttcctcaatctgatatcccagcttcctgaggctttcaattacttccagtgccacagaaagattttctctctggcactctcctgcaatgtggttctgcatatgcgcatattttttatatgaaaatgtaagtcctttataatcttctttttcgatactcatctgttccggctctgcttctgtgtatatacagttcagactctctgctttctttcgcaggatcagtctgacattctcctgctgtcttgctgacactaccgtacatcccggtttgatgatcccggatttcgtctgtgcgatctcttccagggtatctccgatcacccccagatgatcaacactaatcgttgcaaatactgcgcaaactgtattcttaattacattcgtcgcatctgtctctccgccgagaccggtttccaatacaaccagatcacatttttgtttcttaaaatacaaaaaagccatcgccgtctctacttcaaacactgtcggaacaggttctcctttacatacaagccggtcaattgcttcttttatctcttccatgatctctgcaaattctgattcagagatccatttcccatctatctgtatcttctccagataagaaatgactgtcggtgaaacatatcgcccggttttgtatcctgccttacttaatatcattgaagtgtatgcaagcacagatccttttccattcgttcctgcaatatgtatgaacttcagatcatcctgggggttcccaagttcacgcaacagacctcgaatcgtatctaagccaagtacacttccgtatttcgacatctcgtccaaatataccctcgcttctttataggtcacgtctttattttcctttcatcaaaaaaatagtgctgtcaaacagacatttctgcctaacagcactatcataccactattgaatcacactaacaagtgattgcttctttaatttattagatattcagcagatcactgaacaccttcagtgcaccatctgtctcgtgtgcaagtacacgttttgcaagtactttaccaagctgtacaccttcctggtcaaagctgttcacattccatacaaatccctggaacataactttattctcaaagtgtgcaagaagtgcaccgagagatcccggatttacctgctctccgataatgatgcttgatggacgtccgccttcgaaattcttattacggttctcatcggatttaccacatgcaaatgcaacgatctgggcagctacatttgcacaaagtttctgctggcttgtgctgtcctggatcacaacatctgtttccatctggctgttcttgtatccaacgaactgtaacggcacgatatccgttccctgatgcagtaactgatagaatgagtgctgtccgtttgttccaggctctccgaagatgaccggtcctgtaggatagttaaccggctcaccgaaacggttgacagatttaccgttagattccatatccaactgctgtaaatgtgcagggaaacggctcagtgcctgggaatatggaagtacggccgtacttggatatcctaatacatttctctcatatacaccaatcagtgcatccagcattgcaggattcttgaatacatctttgttcttagaaagtgcatcttctgctgcagcaccatcaaggaactgtgcaaatacttccggtccgaatgccagagataatacagcgcctccaactgcagatgtagaagaataacgtcctccgatatagtcatccatgaagaatgctgcaagataatcgtcactcttagccagcggagatgtctcacttgtaacagcaatcatgtgcttagaagcatccagtcccgcattcttcagtgcatcttttacaaatgattcattggttaatgtctcaagtgttgttcctgattttgataccagtacgaagatagaatgtgcaacatcgatagaattaagtacagctgccgcatcatcagggtctacgttactgataaatttggcttccatcttgaatgtgtcattcttcttagcccagttctcaagtgcaagatacattgcacgaggtccgagatcacttccaccgataccgatctgtacaaccgttgtaaatttctcaccggctccgtttgtgatctctcctgcatgtactttatttgcaaaatctgcgatcttagcctgctgttctgtatagaatgtacgcttgtccactccgtcagcctctacagtttctccaagctgtccacgtgtcatgtgatgaagtaccagacgtttctcgcctgtgttgatcacttctccgttgtaaagtgcttcaaatttctctgccagctgtgcttcatctgctaattttgcaagtgctgccagtattttatcgtcaacctgctttgcagcatagttataagtaagtccttctgccatcggaacactgtaattctttactcgttctgctccgctttctcctgtcattgcttctacaagatttactcgctcaactttttcaagttctttgaatgatgcaagggtatctaagttgttccaggtaatcataatattagattcctccttcaaaaaaataaatatgatctttacggtcatgagtcaggccgtatttctcgttaattttagcacattttcagtataataacaattaaaaagcaaccaacatatgttgattgcttttaccttttatatataccttcaaaactgcatacaagaaatatttctttcatcctacctatcaccttgcttggtcatgccctcgaccgattagtatcagtcagctccatgagcaggcaagagagattcttcttactaattacttatattatggtgtaatgatggttaagatgaaagatgcagacggaatggtatccggagcatgccactctacagctgacacacttcgtccatgccttcagatcctgaagacaaaaccaggaacaaagcttgtatctgcattctttgttatggtagtacctgactgcgacatgggagagaacggaacatttgtattcgctgactgcggactgaaccagaatcctacatccgaagagcttgcagcaatcgctcagtcttcagcagaaagcttcaaacagctcgttggtgctgatccaagagttgctatgctttcttactcaacaatgggaagtgcaaaacacgatgacgtaacaaaggtacaggaagctgttaagatcgcaaaagctgagaatccggatcttatgttagacggagagatgcagcttgatgcagcacttgttccttctgttggagcagctaaagcaccaggaagccaggttgcaggaaaagccaatactctgatcttccctaaccttgatgcaggtaacattggatacaaacttgttcagcgtcttgcaaaagcagaagcttacggaccaatgacacagggaatcgcagcacctgttaacgacctttcaagaggatgcagtgctaaggatattgaaggtgttgttgcaatcacagcagttcagtgccagaatcagtaagagataaagtaagaggagaaataatatgaaagtattagtaatgaactgcggaagttcatctttaaaatatcagttgatcgacatggagaacgagagcgttcttgcaaaaggtatctgtgaaagaatcggagccgatggatctgtattaacacacaaaccaacaggaaaagataaatatgttgtagagcaggcaatgccagatcatggtgtagcagtacagttagtactggatgctttacaggataaagagcatggtgtgatcgaaagtgcggatgagattacagcaatcggacaccgtgtactgcatgcaggtactatttacagtgatgcaacacttgtaacagaagacgtgaagaaagttgttcgtgactgcttcgacctcggacctcttcataaccctgcaaacctgatcggtattgaagcttgcgaaaaagcaatgcctggcaaaccgaatgtagcagtattcgatacagcatttggtatgaatattccaaagaaagcagctatgtatgcaatcccatatgaatattatgagaaatacagcatcagaagatatggtttccacggaacaagccatatgttcgtatctggtgaaactgtaaaacttcttggaaaagaagatgcaaaggttattgtatgccacattggtaatggtgcaagtatctccgcatctatcggtggaaaatgcgtagacnnnnnnnnnnnnnnnnnnnnnnnnnnnnnnnnnnnnnnnnnnnnnnnnnnnnnnnnnnnnnnnnnnnnnnnnnnnnnnnnnnnngacttactcctttggaaggacttgttatgggaacacgtagtggagatgttgatcctgcagttcttcagttcatctgcaatcatgaagatatcagcgtagatgagatgctgaatatcctgaacaaaaagtcaggacttcttggaatcagcggtgtgtcttctgacttccgtgatgtaagacaggcagctgctgacggaaacgaaagagcacagcttgcaatggatacttacaaataccgtgttgcaaaatatatcggatcttatacagcagcaatgaacggtgtagatgcaatcacatttacagccggtgttggagagaatgctccggacctcagaaaagacatctgtgattaccttggatatcttggcgtagagctcgacgaagaaaagaatgagaatgttcacggagagacaaccgtaatttctacaccagaatcaaaagtaaaagtaattgtccttcctacaaacgaagagttagctattgctcgtgaaacagcaaaattagtttaagactaaatgactaaaagaatgtaaatttctgttgacaaaataattttacatgatataatagtctagtgtgtgaataggagacgatactatgatattaaacctatccgacgttctgtctgagcagcataaagcaatacatgaatctgttccgattgaaatgacttgtttcaagtctgagatgggagattatgcaattacagagaagacaccacttgaattgtctgtagaatatgcaggtgaccgcaagttggaagtgactggtaaagctgagattacatcagttgcaccatgtgacagatgtctggaagatgtagaagtgaaggtgacacttgacttcaagcataagattgatacagagtcagatgcatatgatcagtcagaagatttagacgagaataactatattgacggatatagcttagatgtagaacaattggtctacaacgagttattggtagggtggccgacgaaaattctatgcagcgaagactgtaaaggtatttgcaacgtatgtggtcagaacctgaataaaggtacctgtaactgtgaagatacggggctcgaccctagaatgtcagttatccgtgatgtatttaagaattttaaggaggtgtaacctatgtcaatttgtccaaagaataaatcttctaaagcaagaagagacaaaagaagagcaaactggaaaatgagcgcaccaaacctggtaaaatgcagcaagtgtggcgaattaatgatgcctcacagagtatgcaaggcttgtggttcatacaacaaaaaagaaatcattgctcaggattaatttttgaaaaatgataagaaagagacaatcagttttggttgtctcttttttgtcatgcattcggaagaagctaccgttggcaggttctgcagatgcaatctgaatatgcagaaaatattttttattaaagttttctgtatataaattttgtgaaaaatttcgaaaaaaagataaaataattgcttttagtgttgcaacatttcgcgaaagtgttataattttaaccagatatagagcgtagtctataaatcagatgccgatggggaaagaaatctgttttactggcagaagaggaaagattacgtagctaaggaggaaaacaaaatgacagaagtagcaaagcgtattgaaaagcttcgcgcactgatggcagagcagaatatcgatgcatatgttgtaccgactgcagatttccatcaaagtgagtatgtaggagagcatttcaaagcaagaaagttcattactggattcagtggttcctacggaacagccgtaatcgcaaaagatgatgcgggtctgtggacagatggaagatatttcacacaggcactgacagagatggaaggcagtggagtacgtctgatgaagatgttcgttgatgatacaccttctacaacagaatggcttgcccagaagatcccggaaggcggtaaggtcgcatttgatggtcgtgtcctttctatgggtgaaggacaggaatatgaagaagtattgggcgcaaagaatatcacgatcgaatatgaagtagatctgatcgaccagatctgggaagatcgcccgtctctttctaagaaaccttgtttcttcctggaagacaaatacacaggagagaatgttgcatccaagctgaaacgagttcgtgagaagatggctgaatacggagcaacggtacatttgattgcgtctctggatgataacgcatggcttctgaacttcagaggagatgatattgacttcttcccattggtactggactatgtgatcgtacgtaaagacagtgtagatctgtatatcgatgacagcaaactgaatgactgcatcagagaagagatggcaaagaataatgtcaacattcatccatacaatgatatttacgaagatgctaagaagattggtgcagatgaggttgcactgattgacccgatgaagatgaactatgcactgtataagagtcttccatgtaaggtagtagaaggagctaatccgactatcttgatgaaagcaattaagaatgctgttgagattgaaaatatcaaaaatgcagaattgaaagacagtattgcactgacgaagttcatttactgggttaagaaaaattatgacaagatggagattacagagctttctgcttcagataaactgacagctctgcgtgcagaacaggaaggatatatccgtgactcattcgaacctctgcaggctttcggtgagcacgctgcaatgatgcattatgcaccgtctaaagagacagacgttgtattaaaagaaggcggtatgcttctgagcgatacaggcggcggatattatgaaggttctactgatattaccagaacaacagtactgggacatatcacaccggaactgaagaaatattacacagctgtatacagagcaatgcagcacttaagcgcagcaaacttcctctatggtaaccacggatggtctctggatgtattggcaagacagccaatctgggatatgaacaaagacttccagtgcggaaccggacatggtttcggatatcttggaagtatccacgagccgccaacaggattccgctggtacatcgttccttctaagaacgaacatcatcagtttgagcctggtatggtaattacagatgagccgggaatctatgaagaaggagattttggtatccgtatcgagaacaacctgcttactgtaaacggtgagaagaataaatatggacagttcatgcactttgagactctgaacttcgtaccaatcgaccttgatggtatcgatccggaagaactgacaagatcagagaaagaatggctgaatgattatcacaaagcctgctacgagaaagttggtccatatctgactgatgaagaaagagaatggctgaaagaatacacaagagctatctaatacttctaaagtacatagaaaaagctgcaagtaagtaactttacttactcataagaaaatttaactgacaaggggtgtcagaaaattataataaaaaaatgccgcggaccagcggtctgcggcatcttttaagaaaaggagaatagataaaatggcaaaaataacagaaggatatatgcctttccacggctatcagacatattacagaatcgttggagaacagaaagataacggaaaagctccgctgatctgcttacatggcggacctggatctacacataactattttgaagtactggataatgttgcagatgatgatgatcgtatgatcattatgtatgatcagttgggttgcggtaaatcttacctggatggacatccggagatgtggacacaggatctttggctggatgaattggatgcattaagagaacacctcggactggatgaatgccatatcattggccagtcatggggcggtatgatgcagattgcatatgcgattgaacgtggagcaaaaggtgtaaaatcattcatcatttcttccggtcatccaagcagcagcctgtgggcaagagaaggaatgcgcagaatcaagatgatgacagaagaagatcaagcagcgatcaacgatgccctggagcgtaatgacttcacaggagaagcttatctgaaagctgtagataactatatggacagatactgcaattactggagagaagatcttccggagtgctgtacaagacctaagaaatctggtggagaagcttatctgtatggatggggaccgaacgaattcgttccatccggtacactgaaagattttgaatatatcgacaggcttcatgagattaaagttccatcactgatcatgagtggtatctctgatctttgttcaccattagttgcaaagactatggcagacgagatcccggatacgaaatggattctctgggagagagcaagacatacaacatttgtagacagacacgatgactactgtgtagaactgatcaagtggatgaacgaatacgataaataaaatacataaaatgatttgaaaaagatctccgtcatttgacggggatctttttcaaatgcaatatctgtaaattaatagtgacttcactgcgtaaatgtgataaaataaatcgtctggcatataagaataatcaatgtctgataatataatctgataagaaagagggaaagttctgattgtaatcatggaaaatcagaactgaaagagagatggaaaaagaaaaaaataacagaagttccttttcaggaaaaataggattcgttctgtctgcggcaggcgcatccgtcggtctgggaaatatctggagattcccctatttggccgcaaaatatggtggaggtatattcctcctgatctacatcctgcttgcgctgacatttggttatacaatgatcgttgcggaatcagctcttggacgtatgacaagaaagagtccggttggtgcgtttaaagcctttggcaaaaaggccggatggttgtcgttcggtggatggatcaatgcaattattcctgtgttgatcgtaccgtattattctgtcatcggtggatgggtaattaaatattttgtggaatacctgaaagggaatggcgcaaaattagcagaagatggatatttttcaaactttatatccaatggtctttctacggaaatatgctttattgttttctgtatgttcacattgatcattatctatgcgggtgtccgtaatggaattgaacgtgtttccaagtttatgatgccgatactggtggtactgtctgtgatcattgcaatctattcggtgacaagaccgggtgcgctggctggtgtgaaatacttccttgtaccaaatcctaaaaacttttcatggatgacggttgtaacagccatgggacagatgttctattctctgtcaattgctatgggtattttggtcacatttggctcttacatgaaaaaagacacgtccatcgaagattcgacaaggaatgttgaagtatttgatactgcaattgcaattatggctggtctgatgattattccggctgtatttgcattctctggtggagatcctgatacgctgcaggcaggtccgtcattaatgtttattacaattccaaaggtatttgacagcatgggatttggaacgtttgcaggaatcctgttctttttacttgtattatttgctgctgttacaagttctatcgcattaacagaaagtgcagtttctactgtagaagacgaattaaaatggagccgtaagaaatccacggttattgtgggattcattatgattattctcggaacattgtcatgccttggacaatgtaaaagttgataaagacggagcttattatattccacaaaaagatcttacagcagtagacgatgcacttttcccggaagattcactttaaaaagtaatatactgctaaataataatttaataacacaggttttagggattgacattcttagaacctgtgttgtattatatacgaaaatacttgaatgacattcagttattcagtctttaatatcaataaatgttcaaaaaaggcagatcagaattcttatatgatgttgccagacaatccatttatatttgtaaatatgtaagaaagtaatccggtaaaatgaacgttgttttttgaagggaggtagtgacagcggtcggattaatattataaatgaaaaaagaaagtgaggaaacatatgacaaagatgcatagaggcaaaaaggccgcagcttctttgatggcaggaattttattgtgtcagatgtttgtttttggtgtgtcaaagacttctgcagatgccagagaagttgcaaaaaagatgagttttgaagttgttggagaaggaatagtaacagtgacagatacagcagaaagaacgcaggagattacatccggaagtgtgatagaagtaccaaagggaatgtgtgtgcgcgtacaggccgaatccccgaaagaaacggatattgcagtacatgtgttggataaagacggaaattatgagttggaagatgtatcagaagtgcagggaaaatgtttctggcgagacgtcactgctatggaattggagaagaaagttgtagttactttcggtaaagaagataagaaaataagagcagtaagaacaggacagacacgtggaaattataataaaccggaagcaggggatgtgtttaccggaaattgtgtaatcactgctgtagatgggggaaatggacataccgtacatagtgtaacgataggcggatttaccggaatcctggctggagtaacagctactggtggctgtgcggatcacacagctgcggctccgtatgttggccaggagtatacatacagatatacggttaccggagttaataaagttaccggcgaagtgatggggaatctgtattgtaccagtgttacaggagcgacggatggcgtaacaaaagacagtgacggaaggttgatcggatatcagagaatcagtggttctgcattgatctacagaaattacagcggctatgcgaaattaaaaaaggggaaaacacagacgatgcttacgaatgggaatccacagtattctctggaagacgcatgctatggaatttacaaagatcggtcggcgaccaatgaagcagcgacatttacgacggataaagaaggaaattctaacactgtagaacttgaagagggaacttactatgtgaaagaaaagaaagcgccgaaaggataccggctggatgaaacggtttatcctgtgactgttgtttccggccagactgtttctgtaaacgtgaaggatgtgccggtgtactcggatatggaacttattcttgaaaagattgatcaggaatataaagcaggaaaatcacatggggcaggaagtctggagggtgccgaatttaccgtatgttattatgcaggcatatatgatcaggctacacttccaaaaacgccggacagaacctgggtcttaaaatcgaaaaaagaaaaagatagatatgaaagcagattgaataaagattatcaaattagcggggatgatttttattatgcagaagatggaaagattccggtacttccgcttggaacgatcagtattgaagagacaaaagcaccggaaggatattcactggacggagcgtatatagaaagtgtagaagggaaaacagagggcacatattatctgactaaaattatacaggacggaaatcttgcgaagatacagggaggcaatacatataaaattgcggatcgtatattcagaggagatatagaatttcagaagaaagatgaagaaacacaagaatctatggcaggaattccgtttcgaatcacatctgtaacaacgggagagagccacatgattatgacagatgcgaatggatatttttcatcggcctccaattatgtaaaacacagtgaaaataccaatacaggtcaggcagaaagcggaatttggtttgggcttaatagcggcggagagatgtcggaagtaaatgatgataatggtgcatttccttatgatacttataaaatggaagaactacgctgtggacaaaatgtggacaaagcattgtacaaaggaacatttaaaatttcccgtgacaattatatattagacttgggaacaattatgaatcctgatcttgtgatctctacagtggcgaaggatgaagagacaggaactcattattctaatgcagatgagagtgtaacggtgatagatacggttacttatacaggtcttaaaaagggaaaagaatacgtcatgaagggaacactgatggatcacaaaacgggggagcctgttctggattcaaaagggaagaaaatattcggattgcagaaattcattcctaaaacagcaaaaggcagtgtggaagtagagtttaattttgatggaaatacattagcaggaaaaaatattacagtgtttgaagagtgttatctggacgaggagctgatcgcggtacataaagatattgaagatgtcagtcagatgatacattttccggaattgaagacttctgtgaaagacgatcaaacgggaatacatattataaagtctgaaaaggatatgcagattaccgatacggtagaatatcataatttaaagaaaggaaagaaatataagattacaggaattttaatggacaaagatagcgttctttcatacactcgttcgaattcgtttggcgacatatagttgcaatggctatgaattcgtttcgtattgtagaaataacgttctccatatcctcatattggcaataatatccattctgtatttcttcagccagttttttagcaagattttgaaatctccccaaactctcctctgttattaattttattgcttcttcgttataagaaaatgacattagattcaacaaattatcaacaaatttgctgcttatatccaccactttttcacctaagtcttcccagccgcagtccatttctccatcccataaatattcgaccatttcttgttctttcttcaattcgtattactatatactcttagctcttttgtaccctcttattttttgaatatttttcaattttatctgtgatagacttctctcgcttaacatcttgttcgataagttctgcaatatcctctaacgtatttaatatgttctcgtaataatattccacttcatcctcaataccatcaccagcgccaccatcttcatcaaaatccatatatcccactgtaagtatcacatgacctttcgatattacatttccctccccatcttctattgataaaggaatatcctcctgatcaccagcttctactgctcctgaaaattcaccaatattaaattggtaggtttccattccattatgtatctctatcgtatccccatattcaaaattatctggtaatctttgttgttcactaagtttatacaatctttcatacgattgatctgcccacgaatctatttcttctttttcatcagaggttatattatttgtatcagttgaaactgggaaccctttaatatctttcatccctaataccaattgttttatactgtaacttttttctgtatccctaatgattgacaagaactcgtcatatatacacgctatatcttcgtattcttgatacaaatcattaattttctcaaattttgctactatatcattcataaaagaagaatctattaattcttcattcaaatagtcctcatacttatccaacgagcacagtccatacaggtctctctcttgatttattatatccatttcatcatactcttcttcatcttcatctatttcgaaacagtcatgtatggtatcactatttaaaatcactttaaatggaacaattttcaaattattttctttacgatctaattcaattcttactccaaatcttgccatatgtttttcgagattttttctggtttccaaacaataatatgatctagtttctgaatcccacacagcattgtcgtaatcctcataggagcacacaacatctatacttgctgcacataataatgtagcccacgctgtttcatctttgatctcgtcaatgcttctcacacgactactaatacctctaattgaaacaacctccgcatcactataatcgtatccactctctattccatcgctatcacacgataatccatgtacttcaagacaatcctcattctttattttctcctcaatctcagagaaatacctacctataagcgaattaattattcggacaatttctttatattctctctcttgacgatttattgcattatataattcacctaacgattgataaaatatatgattttcagaatatccgcaagctttttttaaccctttatcatcgcttataatggcaattacttcattctcacaaaatctttttctgatttgatttgcaatgaatgcgtctggaaattcttttctttttttctcgctagattcaaatggtggatttatagcaaaataatcagaaactatcccgtccaaatccactaatgacaaattcaatatctctggatttaatttcttcaaaaattttttccacatctccaggctctttgtcctgtattcttctttattcagcattaataaatcagtttttatcccaatttcttccaagaatttatcagatactccatttattagatcttttcgcagtccacgaaacgaagaacaaactccatcgcttgcttttatgatatgtttttctacttcttttaaaacaatgttacttaaaacaatctttatttttccagctttgacatgattaataagtaatcctaatgtactatcttggctaaagtccaatttattggcatcaaagatattcgtatctaacgtaacgtataatggatatttaatcatacttcgtctccttgcatacataatgttccataggtggatttaattctttcttcatattaacataaaaaccgcagtactgtataatctattttatcttggataattttttaaaatccattttcaaacatcgacagccctgccatcatcattccctcatccatatccaattcgttgcctctttgttcttttgctatctcctccggctcttttcccattcctaccttatccctaattttctccataaaatctttatcctgcaaatcttccaacgtacattccaaagaatcatctattaaatctcctataaacggaacttttttaatcgatgaaataaatgctgtaacaactggattgtgttttatatcaatcactgtatccacattttgaagttcttgttttgtattttcaaatgtttcttttgaatccatattatcatcctcacatcgtcaatttttattgcaacattaaagcacttctacattaatccctattcgtccgaatccagactttcttgaaatatcataccacaaacttcaggatatgaaaaatgagtccgataacagagggttactccgtatcagactcacttcattattctttcttcacttatacattttcttcctcttccgcatcaaaacacgcaaaggaaatgcaagcacatatcagattgcccgtactgcaattcctgctgcaataaaaaatccaaatacagctccaataagaattcctagtgcaagcactcttgttgttccagataaatccatttttattgaaataatgataaccatatatggtattccaatcggtacaccatataccagcctaaactgaaaccagtcaatagagccatccaccataaatatgtactgtcccagccatgtaataattctgaataagataagtggtaaaacgccctttgttataaattttctcattgtcattatgctatatcctacgctgatcttaacgcttgcatcaagactgcttgttgcccctgtaacttctggttctttttccgatgctgaaactgtcatcggctgaacaatcactgatgccagcgttgcaacagccattacacctactaagattcttttgaatttcattttcattttaacttcatcctctctttcattcattgttatattctttccaaacaggtttgcacctacgtcattcaaccattggaaccacctcctaagctctattcgtcactgctatcagcaagatggagaacagcacattcatatggcggtagaaactcatgtctcccatacagtcatagggaagatgccggatatattcgagatattttctctgctcattcgtttccccatctcctttcttgttgatggttaaattttatcagagcaattttccaaactcagcaacacaactgttgatattcttccaatctgtctacagatctgtagaaattgtaaaaacactgaactctcatccttttttgatagaattcagtgtttctgtttttttgtaaattccagatattcttttgcattttgcatagctcctacgacaaatgcctgatcctgttccggcatctgacgtatctcattgcatatattatccacttgactttctgatttttcagcctctatatgtacatatctctttggaagtaaatcctgcaaattcactttcaacaccaacgttgccaccaaaaatgtttccatggaataattccccttttccattcgatatactgtctgtctatctacgtccattttttctgccaatttctcctgcgtcagacttttctcttctcgcacaatacgcagattatctccaattttcactttatcattcttaactgacgcaagcatttcgtccacctcctttcccattttttatgtcaacttttactcgaccgtatatctttttaggacataaaaaatgcctgatgatatggttgtcttttaatcaaacatcccatactcatcaggcgttggtgattatagtagtagtatgacagatatcataacaaatactatatcccgatttgctctgtatgaatttcttgtctatgcgctctcactttaacaattgatctacatcttggacactttatttgtatcgttccttctgtatgtaaatcaatgtcaactaatcttctgtttctgcaggtcggacactcaactggtacaatatcaactctttgcatattagcctccttttactagaaggccagccaaagggaaagtcaagctgaccaagttttccacaagagatttgtttagcatttccaaggtagcgatgtttatatcatgcgaacatacgttctttttgtcaaattttatattctttttctcaattcttttcttctgtatttcgagacaaaaaaagccggggcagaatggcatacgtataccatcctgctccggcttatctcgatatttcggatagctcttgtccgagcaatcataatttatctttattcaattacaacaatcccaccattgggatcaattataatgcacctgcatttttctccataaaaagcagcaagaaattcttttatggtataggtgtcttttttattcccaccacccttcactaagaatgccggcaatccatctacccatgctttgtcccctactcgtacattataatgctgcgttcgtaattcatcatctttgtttctcataaaatttcatatacctcattttacacaccaacagtgtactttctctctgtttctattatagtattgtttttttcttaatgctttcattggtacttttctaacacctcctaaaaaatgtacagttttcccaacaaagttcttgacattcaatactatctgaagtaaaataagatagtcatggttacatcaattttgtattatcgttttaacgtaatatagtattgatgtttctttatggctagatgagattctggtacaatctcataagttagatagttgccaaagcaacttcgttgattcaactaattatgcagagacttatcctgtggggtaagtctctttcttgattataactccacaattttaaaatgtcaatattacataaagtttttgtaaaatttgcataaaacttcgtcacatttacctacattttgaacattctttgtcgtgaaaatattaaaatattaatatcctatcattttgctaattgacaatgcaatattttatttctataatttaattatcacaacaggtagggaaattcatataacgtaactgctggaatgttggaggaggaaatgtagatgaacaatcaggaatatgtagaaaaaatcttggaattgattaaatcacatatgaaacagaacaacataactcaaaaaaagctggtcgaattatgtaaaggaaaaaaaattaaaatatctcaaggtactatctctaatgcattcaacaccccttcatctgttcgccttaccactttaatcaacatttgtgatggattgaatattagtctttcaactcttatgaaaaatattgaattatcactgaaattaccagagccttcagacaatctaatagtttatgatacatcagatcctgcgtacagagggtatttgaacagctatcatgtttattttttaagtaccgatgaaaaaaaagtaggagaacttgtccatggaattttgaactttaagaatagcaatactcctggtccttgtaaagcattgctggaattaaataccggcgatcaagatccttacaccaaaaaaattcatataaaaaagtataccggcgatatgatcatttctcgtgtaggttgcatctactgtaacttgatttcatatgaatatggtgatatttggacacttgtattcaaccatctgcagcttaactttgactcttttatcggtggtatcggaggtggcattacctcttctgccggaggaactcgtattccaactatacacaaagtatttctcagttccaccgagcttacagaagatcagcagttctatgtttgtggactgctgcgcttataccgtgatgaaatcacgatttctacccaacaattgaataccttgatgaacgactctaaactggatttaaaattcaaacgaaacatcgaaaggatcttggccaagccagagattttttatagcattcctgtagagtctctcaaatcatctgttccaaataagaattacgtaaaaatgctttctatgttattgcaatactcttctatgccatataatgataagattacaatggcagaaacggatttagcccaatatatcatacgtcccagtgaataacactgggactgtaatgttttttatctttttacaattatttgtatacaacttttcatctttatatccattcctttcgcgctgctcaaggcacaaaacgtcatgaaaaaacgttggcttgttgcagctttctttttataattgtttctataggtgtttatgatctcctgaattgtcccatttctgattacacagattgttcaaaaacagctcagtcttgtgtccacaattgttctttttgatatcgccggaacagtccggcgatatcattttatccaaccaattcgttaagttctttcaatgcatatgcaatcgctgtcgcgttttcatatccaaatgattcatcacttccagaaatggactcccggttccaaaatatatcgttcaaataagataattcacatcccatatgccatccaggaatgcataaaaacattccactcatttgagaaccaaacaagatatgaaagctgtatccttctgctgatacgattgcttcataaggttctttatccgtttttagcggttcaatccgtccttctttctgtacgatttctgaatcttcttcctcatcaccgtagaaatataccactggataccgataagtgagagtcatgattgttcacatccccttaacatttcatgttcactgacgtagataacatcctgatcatcaatgatacggagattttgctggcatccatacatcagggatttttcacaaatccggttaatcagtcgtaagcgcttaaattttagacatggataatcgagtaggagaagattcctcttgatgaggaattttcgacctctcacaccaccgtgcgtcagactgtctaacgatttgaaaattcagtctgatgtacggtatttttatcttcgatttttttaataccatttttatctttgtttttcacatgaattacatatgttcctctccctgctacatcacactttcttcaaacttcgttactaattcttctgttgaaaacatgcttaataatcgcttaaagttataagcgataaacatagatgcagcttctgcgtcaacattctcttgtctgcgtcgaagaaagaaactatatccgagacttctttttatagtcccaaatggatgctccacgatacatcttcatatacccaacgctgtatcattcttccagatgaagaagtagtgcagtcttttttatatttgcatgaattgcagtctgtacacttatatttgcgatacttcataccattcttcgaagtattttcaaaaaatcgcaatctatctcctgccgggcatgtatattcatcagtttcaccattatatataaacttttctttgcgaaattcattattctttgtagcattattcgctttagctttttttataaagacattcattccggcatcaacacagttttttatctccgttccgttataataacctgtatctgccagaactgtagaggactctttttctaaaagttcggatgctttttgtgccatagtgtaaagctggttttggtcatttatatcattagtcgtcgaaatatctacaacaaaatgattctttgcatctacaacaaactgtacattgtagcagatatccaatgaaccgttatttttcatccttcttgaatcaggatctgtcaaactcttttgttccagtcctttatcttttaattcctgtttttgtgtaagatactgtttttttagctcttgatatgtttttagtttatctgtaaggtcatctgccagcacttcatctttaacgattgccataagatatgcatttatctgagcttctgcatattcgatttttttatctaaaccgctttgcgtaatacaattatgcttgctgttttgagcacgaatcttagttccatcaataacaatcatttctccatcaataagcccccaacctttgagaataagggtaagatttcgtaatgtattgtgaaacacagccttattcttctgaacaaaacctgcaatagtaccatgatcaggtgttatgcagtttataagccacattaattccaggttgcgttttgcttccgtttccaatgctctgctagaacgaatcttatttaaatagccatagatatgaagttttaataaatcaaatcggcgataaggtgattgtcctcgattcctaccactatactctataaaacctagagtttctaaatttaaggattctacataagaatctattactcggacagaattatccttacttattaagtcatctaatgaagtggtcaccattcttgtttgatatctatctgtgccaacaatatatgccataacgaatccccctacgatactgtatttggtagttttattataacatttttcttaatcgttagacagtctggcgtaccgttcggtacacggcggttcaatcaacttaacatgtaacacacctttcagtgtaataatctaacattgagattagtccaaatgaggctaatctcttgtttgttattgctatatttacagcaccacagctacatacatgagcataggctcttgaacaataaccaactttgtatgccgtaatcctgtcaattccaagcttcatcaaattctttgcgcgattctgcggagttttccagtgtttccatatgcatatacgaagtctataccgaatatttgcatctaatttcgcacataagattttcatggtcctatgtcaagatttagtacaagttaaaatgagaaatttctccccattttaacctgccagaagttcagcctcagtgatcagaagactgtagcggtttaagctgttgatgaactggtttctgtcttcaaaatgcattccggtaagggtatttagaattcgggaaaagttggtcatcagtacaggaacgcctttttccagaagggcattggcaatgcagcctgcaaaaaaagattttccagtaccgacatcaccccagatgagaagtccggaagcatttgctctcatctcttcccagttgcttacataattgtgtgccagttttatttccggattgatgccgttatccctggcaaaagtgtagtcatagagtgctttgtcctgtaagccgctggttttaagatgctctatttccatttgtttttcatgaagttttctctgggcttcttcctgctcaaagatttcctgctggcatttacagcggatggaaggaataagaacctttccctgtaattcatgcctgcattgccttggcgtattgcatttggaacagtagatcaggtggtctgtttcgttaaaatattcatcagactgaagctctctgtttggggttatagctgttggtttttctataaattttgtcataatgtttcgtattcctcactttcgtaatttcgttgtcgggaagcaggatgatcctgtcttgcccaactgatgatggtagctgcgtggttctgatattgctttccggtagaagccatataaccggataagcgttcaatataatccttccagtcagggattgtctgccggatatcttcaagctctttttctgacagaaaaacattttgaaattttccatagggtgagagtggctccttactccctcttattgctaaattgttcttttttatctctttcttattaccagacagttttctgtctgtatcaggaaaagaatcctgtctgtcaataggacagttttttgtctgtcttagggaaagaaatctgtctgtatagtggatggtttcttttgggagttttacataaatccgattgggctgtccgggaccctgccgttttcggaagataagctcctgtttttccagtactgccagagcagttttaaccgtcatctggcttttgtggagnnnnnnnnnngaaagaatcctgtctgtcaataggacagttttctgtctgtcttagggaaagaaatctgtctgtatagtggatggcttcttttgggagttttacataaattcgattgggctgtccgggtccctgccgttttcggaagataagctcctgtttttccagtactgccagagcagttttaaccgtcatctggcttttgtggagaacttctgccagtgcttcaattgtaaagtaaatgaacacatgaccatcgatatctgaccagccctcatttttctgggaaagccttgcccggtcgagcaggataatataaagcattttggcagtttcgtttatttccatgtcnnnnnnnnnnaaaacggggaaacatcatataagatggcaggttggtgtctgctgtcagaaagtccgtcatgtgttcacctccaatcagttattcgccaagaaaatcccagtctacatcactatctggcagtgaattttcaggtgctggaaaggacgccctgatttggggctccctttgcaccatgcctgcagtcagtccggaaagaaaaagtggcaatgcctgtttcagactgttttccactgcatctataatctgtttcacaaaaagttcttcccgttctcttgtttccagataaggatcagcctgtgtgcggtagtagcggtcaaaataatctaccagtgcaagagagattacctgactgtaagatttaaaatcctgcctgtccatcgtctgtaaatattcccaggctctccgctgctgttctttgtccagattaaagcgtaggtttgtgttgcggatattgttctgcatggtttatcccctccttttatcgtattgattgattcagcaggttgtaccggtgtggtactgctttgctgtgagataagcatacgaaaatcagaggaaaaaggcattgaggggaaattgagttggaattgagaaaaagatgcaatattttttgagttgaagtataatatcaagtgttaagccaatagaaataaaaaacgttattgctaacgtgtatataagaacaaaggagtgaattacatgatgtataatccacaacttgatacatttatctgcgttgtagaagctggaagttttagtaaagcggcagaagaattatatataagtgcacctgcggttattaaacagataaattctttggaaaacagcttaaatttgcaattatttgaaagaacacacagaggtcttattattacggaagctggtaaatcgctctatcaggatgcaaaatatctgattcaatattcaaaagaatcgttgatacgggcgcaggaagcaatgaatcataatgaagaaatcattcgtgttggaatatctccgatgacgccaccggaagtttttgtggaactttggcctaagatacagaaaatatatccggagatgaagtttaaattgattacatttgaaaatacaccagagaatgcaagagagatactggctaatatgggaaagaatattgatgtgatagctggaatctttgatgaaacaatgcttgaactcagaggctgtgatggcactgagatttcaagagaaccattttgtgtggcggtatcaattcatcacaggctggcaaaaaaagaaaaaattacacttgatgatctggctggagaaaatcttatgctcatgcgaagaggatggagttattatggcgatatgctaagggatgatatgatgaaaaatcatcctgaaattaatattgtagactttaatctgtacaatgtagaagcatttaaccgatgcgaaaacaataatgaggtattactggcattcaagagctgggaaagtgttcatccactgatcagaatcattccagtagagtgggattatactatgccgtttggaattcttcattcgaaaaaaccgtccattaaggttaagcggctgataaatgctattaacaaggtaaaataaaaattgaatacatgcgagtagaaacctaaaggttaatactgaataacaaaacgagacttctaatggagtctcgttttgttatactttagctgaagtgaaaatggaggatactatatgcagataaagaggatagctcttggaggaatcatcatgactgttatcatgttcagtgggtgtagcacaacagtccataacctggcaatcgtggaagaaaaaacgctggaaacaggaaaaacagagcaagagagcgtgacagagaaggatatcaatatgaatgaaaaagaaagttttaatgcagaaagtaatataaatgatgttatccatgattcagctttcgatgattatggcagactcatatttccggtagatatggaaatagaggacaatctgaaattaaaagacgtcagctctattttgccgtggtacagcgaagtcaacaccgataaaacagtagaaatcgtaaattatatgaaaaatcaggcaatgaatggtgagcagattttttatccaatatacagtgaagaagaaatgcaggcagatgcggataaaaaggatacaggtttatttttctttcggggaaatgcaggagcaaaaacaacgattatcaatgcaggaggaggctttgtatatgtagccggaatacatgatagctttcctcatgccttagaattgtcaaagaaaggctataatgcatttgctcttatttatcgtccgggagcacagactgcctgtgaggatcttgccagagcaattgcgtttttacatgaaaatgcagagaaactacagattgatatgacggattattctctctggggtggctcagcaggagcaaggatggcggcctggcttggttcttatggaacagcttactttggagaaaaagaatatcctgcaccggctgcggtgattatgcagtatacaggactttcccaggtgacaggaatggagcctccaacctatgcctgtgtcggaacaagtgacggaattgcatcatacagaagtatggaaaaatatatttcccagatacaacaaaatggcccaaatacaaaaatagaagtatttaaaggcctttctcatggatttggattgggagaggggactgtagcagaaggatggattgatcgtgcaatatctttctgggaagacaatatgaatgctttagataagaggtaggatatgaaaaataaacgatttacagcaaaaatattgatagatataggaatgacgatatgtttgcttcttcttatgccatatagtctgctcagcgagactgcacatgagtggattggtatggcgatgcttgtgctttttatttcacatcacatactgaatcataaatgggtgacctctgtaaggaaaggaaaatataatgcgttcagagtgatacagacagtactggttatcatcatgcttattcttataatgggttccatgataagtggaatattgttatctaattatatatttaaatggataaagatttccggaacatatatgacagccagacagatacatatgttttgcgcatactggggactggtggtgatgtcattacatctcggatttcattggaatatagcggtagcaatggcaggacgattatgggaacatccatccgtcatcagaacatgggcagcaagatctgtcgcaaccacaattgcaggttatggtttatatgcattttacaggagacagataggagattatctgattatgaggatgcattttgtattttatgattatgaaaaggggatctttccttttctgctggattatctggcagtaatgatattgattgcatttattggatattatagtggagtgtttctaaagaaaacaggtaagagaaaacgaaaaggttcatactgaaagaaggtggtgtatttatggaaaagcggaaattagtacttacaattattggagttgttattttagcaatggtaatcatggtatatatctacttttcaaaacctggcaaggatgaaaagaagaatcaacaaacaataaaccaggtacagaccgtacagcagaagacaaatgagaaaaaagaaaatacagaaaaaaatacatccggagatgaattggaaaatgttacgccgggaagcgaagaataccggggcttcctcctggataatgttcttcattctccaaatgaaggggacattcattacaatgtatatattccggatgcatatgacgggacaaaggaatatgcactatatgtaacattacccggatatcagggattatattttcagggcgtgggagaaaatatccggacagaagattttggatttgaagcacagaagtatattaccgatatgattattgtagctccacagttaaatgactggggacagacatcagcagatcagacaattgaactgacacagtattttctgacgcattatattattaatccatcgaaagtatatattaatggttattccggaggaggagaaaccctgtcactggtattggcaaagcagccggaattatatacagcggcacttatgtgcagctctcagtgggatggtgcatatgagccggttgtggagataaaaacgccggtatattttgtgattggcgaaagcgacgaatactatggatcagaaccttttaaaaaggcataccagcagatacatgagctttacaaagaacagggattatcggaatcagagattgataaactggtggtactggatgtaaaagataaagattactttgaaggaacaccggtcacttatcagcatggcggtggctatctgttttgtcgtgacaaagaaattatgggatggctgttcaatcagtaagaaccagaataaaccgaaaggttaagactgaaaaacttatcgaaacttctcaaaggaatctatcagtattatagtatgaatgtaagatgaatgaaagaaaacaaggaggatacgacaatggaatatatttcattaaataatggtgtaaaaatgccaatactgggatatggcgtatatcaggtaacaaaagaggaatgtgaaagatgtgtgcttgatgctttaaaagttggataccgggcgattgatacagcacagagttattttaatgaggaagaggttgggaatgcaatccaaaagtcaggcattccaagagaagaaatcttccttacaacaaaggtgtgggttgaacattatggatatgaagaagcaaagaaatcagttcttgaatccatgaaaaagttaaagacagattatctggatctggtattgcttcaccagccattttcagatgcttacggtgcttaccatgcattggaagatctgtacgatgagggaaaaatcagagcaatcggaatttccaacttttatgtagacagaatggttgattttgcatccttcaaccgcattaaacctatggtaaatcaggtggaaacccacatcttcaatcagcagaaagagatgaaggaatgggcagacaaatatgacatccggttagaagcatgggcaccattcggtgagggcagaggaggcacatttgagaatcctgtcatcgcagagattgcagaaaaatatcagaagactccggcacaggttatgcttcgctggcatattcagagaggggtagtggttattccgaaatcaacacacattgagagaatggaagaaaactttaatgtttttgatttcacactttctgatgaagatatgaagactattgcagaactggacaagaagacaagctccttcttctcgcatcaggatccgaatatggtggaatggttcgtgaagatggttgaggaaagaaaaaagaataatgacagttcaaaagaaaaaaagaactggtaagcataagaggaaaaatcaatgaaagtattacttgtcaatggcagtccacacaaaaatggctgtacttatacagctctttgtgaagtatccagtgcattaaatgaaaatggcataagtacagatattttttggattggaaacaagccgatttcaggatgtattgcctgcagaaaatgtcaggaaaaaaataaatgcatcctggatgatatcgtgaatgaatttctggaaatagcaggggattatgacggattcgtatttggaactccggtacactggggtggtgcaggcggtgcaatcacatcctttatggacagagtcttttatgccgatttaaacggtggcggcgacagattccgcctgaaacctgccgctgtggtaatttcagcaagaagggccggaacaacggccacatgggatcaggtaaataaatattttggtctgatgcagatgccgattatcacatcgagatattggaatatggtacatgggacgaatccggatgaagtaaaacaggatctcgaaggaatgcaggttatgcagatccttggaaacaatatggcatatttcattaactgtaaaaatgttgcgacaaaaatgggaattgaaatgccaaaggcaccggattttgtatttaccaatttcatccgatagaaattagcgtgacaaacattttatacgacaggaggtgaccttagaatgaaaacaaagaaaatagcagcagtactcttaacatgcatcgtggcaatcggtttgatggcaggatgtggagcaagcaataccaaccagtctgcttctaataatgacagccagtctacaagtacaaaccagtctgggaatgaagaagcggatacaaattccgaaaacactacagatacaacagaaaatacatcaacaggaaatggaaaaacattggttgtatattattcagcttcaggaaatacaaaagatgttgctgaaaagatagcaaaaattacagaggcagatctgtttgaaatagagcctgtggagccatatacagatgatgaccttgactggacagatgatgacagccgggtgtcaagagaacatgatgatgagagcttaagagatgtggaactggtatctacaacagttgataactgggattcatatgatacggtatacattggctatcctaaaatggagtacagtttatagtagtgtatagcgtgtaccaagttataattatggggttgaaaataacagtatacacagataatgtggaaaaatgtgtatgacgtttatatagaaaataacattgaaaaagaaattcaagaatgggtaaattcattaaatttaaaatagaataataattacatgagtgacagaagataagaatctgaattccctgtcacttttatattatttgataagaaaaaagaactggtttatatccgataagaatatagactggttcttatttttaatatgctattatatacacagggagtcggggaatgtcgaactatagcaagccggaaaagaaaaaagattcgtaatacagaaatatatatattgattctaaagagtttaaattttataatgtttcgtaataaggaattatttttaacaagaagaggtaaaagtataatggatatggagatggaaaagagaaaatttttaaatctatgtggcaaaagagatcgagcattattgtcaggtgaaaaaaggatgacattgggggatatggaacgattgacatatctgacagaattttttgaactggagaactacggaatcgccttatggaaatccaaactatccatctgctgtccaagtcttgcttttgctccggtcagttgcctgtgctgtttttccagtctttcaatctctttttctatttcttctgtatctattcttgaaccgattttattcagaattgcttcttcaaatttcggattcttcaccagcttccgaataacttcttccactgcattgttaatcttctcctcgctccattgtttacgatatccacatttatgaccatctaccaggcgacgatgtttgcaggcataatagaaataatccttatataaggttccgtctttctttttctttcggttcacgtttccatacataccgcttccacataacggacatctcaatattccggataaaatatgctcatgatcgaggctatgtgtcttttcatatttcacacctgttttttcccgtttttgatgagccagctcccagtctgtttccgaaataatcccttcatggataccatcgtgcagcatataattttcctgctttacaatgcgatattcatttcttgtaccagaaactttctcgtttttccttcgtccataagccagctttccacagtataccggattatccagaacgccttttataaatgatgcggcaaatgcgtccagtgtattattctgtcgttttttctttttatatccatgctggttcagccatgcagcaatcgcagagattcccatattggtatgaataaatttatcatagatcagacgaataatttccgcttcatcctctgcaatctgcaattctccatttaccaattcatagccatatggagcaaatccgccgttccattttccttccctggctttctgcttacgtccctccattgtctgaacaaggatattctctcgttcaatctctgccaccgcagacagaacagaaatcatcagctttccactatcttttgagctgtcaattccatcttcaacacagatcagattcactccaaaatcctgcatccgctgcaaagaatttaaaacatctgccgcattacgaccaaatctggaaagcttgaacaccagtacaaactgcacctcatctgtgccattctcaatattatccaacattctctgaaattccggtctgccctctacgctctttccagatttaccttcatcggaatactcatttacgatttccatgttctgaaattccgcatatcttttgagtttttctttctgagcatctagactgtatccatctacctgcatggttgtggatactctggtatatatatcgcatttaatctttttattcttcataatcttcctcgcaatataactccgttttgttgtaccaactttattttagtacttgttccaactattttcaatacttctttttattttttattgacatattttcgttacaaccatataataatgatagagacaggatttctgtcatcgaaaatattgttcgcccaccgttggcggcttataagtgatcggctcgaaaatattgttcgctcaccggaagcgtctaataaatgtccggctcgaaaatttcggccctgccgcatggcagggcttattttataggtgataaacatgatatatcaagaaggatacgtttaccatattaaagatgaatactttgaaaaagtacaggattccaacttaatgcagaacaaagagggcggtacataccgtcctactttttactgtctgcgtgacaataaaacttctctgttatggatggttccactcagttctcgtgtagaaaagtttaaagcaatacacgataaacaggtggctaaatacggaaagtgcctaacgattgttttaggtgaatttgatggaaaagaagctgcttttcttctccagaatatgtttccaatcagagagtactatcttgaccatatacatactcgaaataataatccggttcctgttaagcattccattcacagggaagtaacaacacgtatgaaaaaaattcgtcaacttcattccagaggcaaaaaagtggtatttccagatattgaccgactagagcagattatgcttgcagaagtaaaagataacgcaaccgaataatttcacaaaaaagcgacagcctgatttacattttgtatttcaggaaactgccgcttctttttcttccttattctgtttttcttcctccaactcccggaggacttcttcgccgtacttatcaatcatccgtaccagaaaatcaatgcaccgctcaaattcaatattctgttgcataagctcctcccgttattgtttgttctgagcttattttacagaacctgcctgaaaaccacattgaataggaattgattgtaaattgacacaatcactttaaaaatatccgtatttccttgaatcgaatgtatgttcgtgttatgatagatatactcaatcttaactacgaaaggagaatttctattgaatcgatgcgatttttcttctattagcacttgcttaaaaaatcatatcagcgaaagtaatcaaatgagtcagcctgattttttatacgaattatttgaagattttatggatgatccggcaaatcaggatttttcaatggataacggtctggtttgccgctggatgactggtcaggctaaaatcagtcctaaaatatccgcttactattccaagccatccaatcaggaaaaattagcccataccatccaccagaatcttcttccactgatgtctgactgtaatatggctatacaagatatttacactttattcattcaggatgacagcatctcagatgcgaaaaagaaaaatctgactcccttatataaaccagccagttcaagactgctgtttcttgcaaaactgatttcttttggcatggaacgccaattcatcaaacgtaataccaaaaatcagaagctgctcgccggaggcgctttatcccccattgtgctggattatattatggacagtgaggttccgaaaccatgccgtcattttatcggaagagataaagaactggaagaattatataccatgcttgaggaaaaccgtcatgtttttctttgtggaatcgccggaatcggaaaaagtgaacttgccaaagcctacgcaaagcggtacataaagcaatacaccaatatcctttatgtagaatataccggcaatcttcatcaggatattactgacatggattttattgacgatctgccggaaagcactgaacaggaacggtttcaaagacataaccgtttccttcgttccctgaaatccgatactctgcttatcatagataattttaatgtcactgcgacacaggacagctttctgtcagtagttgaatatccagattgagaatagcataaaagatacaccaaaagtgcggaatggaatttatctgacaacgaaaagcaggaaagaaggacatggaataggattacaaaatgtgaaactcgtagtagaaaaatatcatggtcagatggagatctgccatacggagaaatcctttcaagtgaaaatattattatatatgaaattagatgaaaaatagtaaggcgatggtgtcttactatttttttcgaccgatttcgtctatttttgccacctcaaggggcatttttaccatttatgaaaattttgtgattttttagattatagtagtgccaaagtcagaaaaaaggagggtagcggttattttgtaaaggaattatagaaaaagattacaagagggagaaagagactatgaagagatttcgaaagtcggctatagccttagtacttgcactcctgatggcactacagggaacagagcctatttttgtacaggcaaaagaggccattgaggatgtacagaagaatgcagatttctccagaccagaggctttgacggaagaggaagcagggattacagattccacatctggagaacaagataagagtcagcagtctgatgcggacgtacaaaatgaaacgacgccatcagaagatacagagacgcaggaagaacagacaactccagcggaagaaacagaagaaaatccgcaggaaaaagaagtggagttgaaagaaccacaggattactatccgattccagaagaaccggaaggtgaactgattgattatgatgccatttccaagacttataagacaggggacaagcagtatacaaccgtttatggaggttatgtcggaacttataagaatgaggatggagataccgagctggttgataatacacttgtaaaaccagaagaagcagatactccggcatccgaagaagcacaggaagccagcagtgtagtggcaactgaagaaaaggaagagaaaacagaagtttatcagaacaaggcaaacgattatgctatccttcttccggaacagatgtcagaagagaatggtgtaacgattgaaaatggaaagaccagaatcgggatcattccggtagatggagattatacacattccgttattaaagacaatgcgatcctttataatgaagtttacgagggcgcagatgttcagtatacagtactggattccagcattaaggaagatatcgtacttcagcagccaacagacagggaagtctatgaatacgagctgcagattccggggtatcaggcagaagtaaaagacaatcaggtctatatctatccggaagggaagacaatcaaagatgcgaagtatcttctggagacgccatcaatggaagatgctgccggggaaatcagtttcctgatcacattggaacttcgggaagaagatggaaaaacaatcctgaccgtaaaaccagatagggattggctttcggcagaagaacgtcagtatccggtcaggatcgatccgacaccagtagagattcagaagagttcctttaacatgatcggtgtggaagagggaagtcctaccagtcagattggtgacaacaattatccgtatgtcggatttgatgatggtattaagtctgggaaccttgcaggatttggtactgcacaccagaactgccggacttatatcaaagtaaattcaaattttagtcagattccgaaagattccaaaattgacagtgcaacatttgcagtcagtcagaaaactgcatacagtggtggtgcatcccagtttggactttatcgtgtagatcagtcgtggaacacctccatcacatggaaaacaaaaccagtaaatcttacgtttcaggatgtacagaatgcaagtaccagcaggaacagctatatcaattatgacgtcaaagatctggtcaatgactgggtgcagggaactcatgcgaataacggatttgcactggtagccattgccgaggcaaataaccttggagcttctatgcagtgtgaggtactgaataacagggcatccgtttatggaccgaaactcagcatccagtggtcaccggctgaagatccatatctgcgagatatgtcactggatgaaacaacgatcctgcttcgcccgatgacagaaaagaatacaaatggaaagctgaagtttgatgccgtatttgcagacggaattgcaaagagcaaatctacagtagaatattatctgcttccagatgaggaaaatgaagaacatcacgaaacagatgcaaaaccattgtattcctatccagacagtactgaatacaataagcagttcccggaggcgaataagtattacagcaaagattccaactggcagagtgcactgtattcagggctgacgaaggacaagctttataagatcaaagcaaaagcatcgaaagagattgatggaaagctggaaacaggaaaagaagtgaccagtgacagctttgtgatctatgaagtgaagcagtttgatacattcccgaagattgcaaaatattatggtgttccgcttaagaacattatgaaagacaatcaggttatggacgcactggtagtcgcaaataacacgatctttatccgtaacccacagacaaatgttccatatagtcctgcaccgcttaccgatcaggataagatgcggattgacggagcattgatgggaagaggcctgcactgtgaatttggatttgaaccagtcaacttaaatactggtaacttctacatggatcagtccgatgcgacgatgaatgaactgaatggagaattctccattacaagaagctacaattccaaaggaacagaccagcattccatgttcggacgtggatggagctttaactatgaccagtcactttctcaaatggaggacggaagtcttctgtatatgagaggggacggaagttatctgatctttgataagaatgaagatggaagctacactactccggatggttatgtatatgatttaaaagcagtcagctataaagatacagaccatgactacatcggatgggaactgacagatgcggatcagagcgtctggtcatttgataaatatggaattttacgttatgtaacggatgtgaatggatttaagacagtattagattatgacgatgattataatctgagtaagattacaacaccatccggaaaaacattcggggtaaaacaggataaattcgggcatatcaaggaactgtctcttccagatggtggaaaagtttcttacaaatatgatgagcagggaaatctgatatctgtaacagatccgaatggaacaacaaaagagtacaaatatgatgatgacagccgtatgacaagctggaaagatgagaatggcaatacggttgtaaagaatacttacgataaagaaggaagagttgtagagcagactgatgcagaaaaaggaacggcaactttcaagtacggaaagagttctactacaacaacggataacgaaggaaataagaccgtttatcattatgatgatcagtaccgcacaacatccattgaatatccggatggaacaacctgtgaaaagacttataatgcagagaatcagcttgcttccgaaacgacagcagccggaacaaaaacttacacttatgatacatttggcaatgtagcaacggagacaagagaggatggaaagacagcctcttatacttataatgagcagaataagctgaccagtgcaactggatataacggagcaacggttacttacagttatgacggtaatggaaatatggtcacatctacaaaaccggatggaacagccattacctatacttacgatgacaaacatcgtatggtatcccagacagacggcagaggtgtcacaacaacgtattcgtatgacggaccgaacatgaccggatatgtggatggaaatggagcagcatggggattcacgtatgacgcgatgaatcgtgcagttaccatgacagatccacttggaaatgtaacctcgaacagttacgatgcgaatggcaatctgacttccaagacagcagccgatggcggtgtgaccgcttatacgctggatggtgtgggaaatattacagcaagtactgacgcactggggaataccaccacttatacttatgataagatgtacaacatgaccagtggtacagatccgaaaggaaatcagatcagctacgtttatgataagaattatcagcaggtcaaagcaaccgatgcaaaaggaaatacaattacttataagtatgacagcatgggacgtgtcatagaagagagtaataaagattttggaacaaagctctatgaatatgacaaagcaggaaatctgaaaaaatataccgatggaaatggaaatgcaaccgtatccaagtttgattctcttggacaggtgcttcagtccaaagatgcagttggtaatataaccaaatatgaatatgacgcattaggaaatgaaaccaagattacttatggagatggaagcagccattccaaggaatatgataactgcggaagactcgctaaagagacagatgaattaggtgcagttaccacttatacttatgatgcggcagacaatctggtatcaaaatcagatgacagtggaagaacctggacttatacctacgataatacaggaaaccgcttaagtgaaaccaacccagaaggtggaactaccacatatacttatgataaagcaggaaatctggtatcttctaccgatgaagagggaagaacagatacttatgcttacgacaaggcaggaaatctgactacatccaaagatgcccttggatataccgtatccatgaagtatgacttaaatggaaatctggtatcctctaccgatgaaaatggaaataccagtaccatgacttacgatggtaatggaaacatgacatcggtaagcgatgcaaagggcaacattacagcaatgaaatatgattccaccgacaatctggaacagacggtggatgccctgaaaggaaagaccacttacgaatacgattcacagggcaacagcacaaagatgacagatgccctcggcaatgcgtatagttatgtgtatgataaagagggaaataacacatccataatactgccgacaggggacaaggtgctgatggagtacgatgccatcggacagcttgtaaaatgtacggatgcacagggactcgtaattacctatcaatatgacggagcaggcaacctgatccattcctccgacaatggtggaaacagtatggattatacttatgatggtgccggaaatgtactgacacagaccgatgaacttggcaggacagcaacatacaagtacgatcagtacggcagactcctgaaacttactgaagcagacggaagtatcacatcttatgaatatgatgttatggaccgcattacagcggtaacggatgcggaaggtcataaaacaacctttacctacgataaagtcggcaaccagttatccatgacagaagaagaggaagccacatataaatacgcttacgataagaaagaccgggttatttctcagacaaatccactgggagcatccagcacctttaagtatgacggaaatgataatgtgacggaatctgtcgatgaaaacggtacggttaccaagtatgcttacgataaaaatgacaatctcgtatcccagacagacggaaatggaaatacgacaacctaccagtatgatgaactggaccgcaagatcggtgagacttctccgttaaaagaaacaaatgaataccgttatgatgccattggaaatcttaccaaatcaaaagatccgatgggactcattaccgaatacaaatatgacagcctgagtaacatgacggaacagatttctccaaagggagcagttaccaaatatgattacgacaagcatggcaatgtcatttctgtaacggatgcaaagggaannnnnnnnnnnnnnnnnnnnnnnnnnnnnnnnnnnnnnnnnnnnnnnnnnnnnnnnnnnnnnnnnnnnnnnnnnnnnnnnnnnnnnnnnnnnnnnnnnnngaatgacaatgtcacaaagatgacacaggcgaatggtggagagtatacctatagttatgataaagccggacgtctgaagagtatgaccagtccactgggttatactaaaaatttctcttatgataaagtggacaacgtggtaaaagaaagcgacagcttaaagagtaccactacttatacttacgataagctccataagatgaagtcttctaccaatgcactggatggaacaaccagcttttcttatgataagtatggcaatctggtgaaggagacagatccgcttggacggagcaatacctacagttatgacctggcaggtcagatgacttctgcagctgatccgcttggtaagataactgcttacacttacgacccggcaggaaatattactgagatcaccaaaccgggtggaagaaagaccagctatggatatgataagaattataatgttacatctgtaacagatccgatgggctatgttgcaaagacagtctacgataaagacaaccgtgtaacagaagagaccgatgcactggggcagaaggaatcctatacctatgataaggacagcagggtaacttctattacagacaagcgtggattcacaacgggatttgattacgatgcacatgggaatattcaggttgttacagataagaccggattaaagagccatctggaatatgacaagaatgacaacctgaccaaagtaactgatgcccttggcggtgtaacaacttatggttacgacaacatggataacctggtgaccttcaccaatgcagcaaataagacaacgaattatacttatgacttagaaggcaacctgacatccatcaaagatccggcaggaagaacggagaaattcgactatgatgaaaaaggcagactgaccggacatacacaggcaagcggcaagaaaaccacgtatgattacgacaaactgaatgacctgttggagaaatcttatcaggacgcaaaaggcgagacatccgaaaaggacgtgacctacgcatataacagtgccggggaacgggtatccatgaaggatcagacaggcaagagcagctacgaatacgatgcacttggaagaatcaccaaagtgacaagcggttcgaaaaaggatgtcagctacgtttatgatgacgcagataatctgcaggcaatcgtatacccggatgggacaaagatcagctatgaatacgacttaaatgataatctggtaaaactgacagaccgtaatagaaaagtaaccacttacaagcatgatgcactgaaccgtgtgacagaagttattagaagcaatggaacaaagacggaagtatcttacgatgcagaagatcatatcacaaagattgtcaacacctgtggttcgtgtggcaaagtaatcagtacttatgagtacaagtacaatgatcagggatatgtagttggagaaacagctacggaactggaagccggaacaagaaagacaccaagctgggaagactggtacaactggggcgatacacagaatgagacagacaaagcagactgtgagcatcaggaaaaagagacccagacgacacgtacctatgaatacgatgacaactgggaactgacacgctgtacagaaaaagcagagggcggtaaaaagacagtccataattatacgtatgacaagatcggaaaccggacctcttacgagaagatcgaagatggtgtcagcaaagcaaaatataattacaagtataacgattccaaccagctcatcaaacgcaccaatgcaaagatctggggcgatccgggaacaacctacagctatgataaagatggcaatctgatccaggaatgtgataagacaaacagtgcagatccggttacttatgaatacacagcagagaatcgtctggcagtcgtaaaacagggtggaacagtcctgatggcagccatgtacgatggagataacaaccgggtattcgaactggataacacctataaatgggaagactgttatggcgatgaagtcctgattccggagaaccagcgtaccgaagatgggaacagcccgaaagagcagcttgcctctctggtaaaaggcggttccaatgcaaaaggatacacactgacagagtacatcaacgatatcaatcgtgagaatacagaagtcctcgcagagtatggggcagacgagaaagtacgtcaggcttatacttatggagaaaatggaatcggagaacgggtaagcgttgataaatcggaagaaagcagttattatttatatgacggaagaaacagcgtgaccggaatcctgacagaaaatgctaacctgacgaacagttatcagtatgatccatacggtaaccttacatcaggaacagcagacggtgtcaattactacggttacaatggggagtccacaaatgtaaaaacaggacttcagtatctgcgggcaagatactataacgcagagaacggaacctttacaactgaagatagtgaccttggaacgacagaaaatccattgaccagaaaccgctacgattatacgaccaataatccgctgaattacagtgatccgacaggacattcattgtggagcaggattaagagtacagctaaaaaagcagcgaaagcagtcaagagtgtcggcaagaaaatcgttaatactgcgaaaaaggtagtcaaaacagtagtaaatacagctaagaaagcagcaaaaactattgttaacacagtgaagggggtagcaaaaactgccaaaaatgcagctaaacatgcaaaacagacatatcaatctgtgaaaaatcgtgtaaccagtagcagtacatatcaaaagatcacatccagaggaagtcagtttattcgttctgtaagcaatggggtacagaaaattggaaaaacttatacatctttcaaatcctatgtttcagaaagaacggcagaaatccgctcagaagtggtacgacatatgtgtacgacaacaaatcgtattacagataagcttggaaaagtagactggaatgcggtgaaaaaagtagccattggtataactgcggttacagtttctggtcttgtagttgctgcaacaggcggtttggctgcaggagcagttctggcagcattgccagcaatgggtggcttaggaacggcgatggtttcaggagcagttattggagctattggtggagcttcatatagtgcagtgaattcaggtttgtctggaaatagtctgaaacaagtagcaaaagatacgttagtcggtggtattgcaggagcagtgacaggtggcgttatgggtggccttagttatggggctgggaaacttttgaatgtagtaaggagtgcaggaagtacccataatgatgggattgataaatcgtttaaaaaattagttgcagaagtaaccgaaacaaaattgccagaaggcacttgggaaaaaccaccattagagcgaggagatattattgacaaagctatgggaaataacttgggacacaatttcccgaccatagataaagtagaaaatggtgttgtgactagtgttaaaagccgagacttaggtgcaaagacttatcaaaatggtaataaattggaaaaggtaattgtcaaggacattaataaagtttcaggatttataggagaaacatttaatggtaaatttgttaatgcggaagaaatagtgggtagacaattacaagtagttgttccaaatgtaacattaagcgaagctcagataaatgcagttaataatgctacaaaacatggtattgataaaggtgttaaactcattattacagtaggaaaataatagcaaagtaaatagcttaaggggaatattttattccccttaagtaatagagaggagaaaacggatatgatttctgtatattataatcaaaaatatggtttcttaattgtgcctaatgccattgaaaggtttatgggatgttatatttctatcgaacctacaattgaaattatggctgaagaaacaatagataagataggctgtgcaattagaaaaggaataaaaattgcagaaagttccccaaaagtagacgaatctcaattaaacaatttttggaaacaaacaaaatataaaagttttccaacattttccaagaattatcaaagaattgatttgaaacaaaatggagatgaattagaaattagaagatgggaacggaataatagagggggatattcgcgaaaaacggaagaaaaagattatattaattttatagaaatgtcggattatgaattgggcttgtttataaaaaaaatgtttgaaccatgtgaaattagaattgatgaaacagaaagatttgaaacattagaggggaaaataattagttattcgattccaaatgagcattataaaaatattggtgatggtcatacagattcttatatgacatatagaaatgaagattatgataagttgtatatttcttttttgataggtgatggaactgattgtacagatgaagtaagcataaaaaatcattacaaaaaaatatacaagcaaatgtcgaatattaaatttgaaagtaaatgtaataaaaaatatgtacattttttaacagaaaatggagaagtattgctgagttttattgataatggttatgtggagttttttatgtgcattccatataatattgaaagaaaagttcaaaaggagtcaatagaacagtatttaaaaatgttattttcgataaaaattgaagataaataaagcgtgaaggagagaatatgcaaaagaagaattgtgttttgtgcataagtataggaattatagtatgtatattgttatcagcttgctccagacaaccagactttgatgccaaatcctacgtccaaagttctcttgatgcacactatcatggagaatataaggactatgcgaatctgttagaaatctcggaaaaagatgccaagaaagaaatcgaagaggattttaatgagagtatccaacagcaatttgatgattccgataacattacggataaaggaattgctgattatgcggaaaaactgacagaagtaaagaaactggcaaaatacaaagtacaagatgtgaaagaagaggatggagtctatacagtaagtgtacaagttgaaccatccaatgtatttcagacattgcaacaaagctctacagaggtaagcaatgaaaaaataaagcagggattggatggaaatgatccggaagtctttgcagctgtattaacagaaagtgtccagaagagtcttgaaaagaacagatatggaaaagctgttactgtaaacgtatccgtggaaaaagataactcaggaaaatatggtcttttggatacagagatgaataagttggaagcagcgatgttcccaacagaataagaatgaatggaaagctatcagaggaaaaaaactggtagctttcttttaaactccaagacaagaaaacttgttaaaaaagctattgtaatagtagaaaaattataataaataatggatgacaagagtcttttattcattatgagaaaaagaaggaatctcctatgaaccaacaagaaatattcacgtaagatggaaaaaagtgctgtaatcgaagaggttgcagcatttttttcttcgacatttttcgaacattataacgtacctatccggtcaccgccatgctccgatttgatttctatatcaaaaatcagatcggaggaaagataaatggcttataacaagacaagtgaagaacgaaagtggaattattggaaagaacaggaagaaaagaaattgcgtgaactgggaatggaagaagagaagatccaaaagctgcgccagatggacagggaagactttctggaagagcgcagataccgggaacatctggatgaaacgatgcaggatatggattccataaaagaaaaggacagcgagctgtttgcaagggatgtaaaggagcttctggatcacataggtgataagcgaatctatgaactattgaaagaaacggagcatcagacactggaaatcctcttactcagtacatggggatattctggaagagaagttgctaagattatgggaatggcagaacagacgatttataccaaaagaaaccgtttgagaaaaaaattaaaaaatttatcaaaaattgaataattatggcgtttttcgtcggctatttaataggcaggtaaattttgccagtgtactttgacaacctcataccagcattacaggtacgttcccgtaagtagaagcgtggcaggaagacgcgaggacagatgaaaagggcatggaagaaattagaccagaaagtgagaggcagagttcttttgtggcgttttcgtttcgagcgaatcatctttaactgaaacaggaccgtggcggtcttttgcgaggatcacttacgaggggataatgatacataggaactgccagtgagcagaggatggactttggnnnnnnnnnnnnnnnnnnnnnnnnnnnnnnnnnnnnnnnnnnnnnnnnnnnnnnnnnnnnnnnnnnnnnnnnnnnnnnnnnnnnnnnnnnnnnnnnnnnnnnnnnnnnnnnnnnnnnnnnnnnnnnnnnnnnnnnnnnnnnnnnnnnnnnnnnnnnnnnnnnnnnnnnnnnnnnnnnnnnnnnnnnnnnnnnnnnnnnnnnnnnnnnnnnnnnnnnnnnnnnnnnnnnnnnnnnnnnnnnnacggctgtagggagaaatcctttacagccgtattgatgtgatatcagcacgcatatcaggtaacaaattatgtattacacaagagaatatctcaatagagcgcatcgagaaattgatactattttccgagtgctgttcccggaacatggaatggcagtaagggaagaacagattatgttatgccacaaaatgctggataacctgctgggaagaaacatagcactgtgtgacgcgggtgtcggtatcggcaagacgtatgcctatctggtggcctgtgttctgatgagaaaatattccctccttgcagaaggatgttccccttatgagcagcgtccggtcgtgatatccacttccagcattgcactccagaaagcaattcttacagaatatatcccttttctctcccggattcttcaggagaacgggacgattcaggcccctattaaagctgtgatacgaaaagggaaagagcattttgtctgcgatgagaggttggagcaacgaatcgttgcaatcgaagaaaaaaacaaaaatgcgttgcagaaagaagctctgctgtcgttgaaagaacattatgatatggacgaagtgtccaacttaagtgggtttgacagaaggatggtgagtgtaccgaagttctgttcgggagactgcccgaaaagaggctcatgcaggtatcagcagtatctagagcgttccagagatcatgaaatgttcattcagatctgtaatcacaattatctgctggctgatggttatcacaggctgcaggattaccgcccgttattaaaagactaccgggcattgattgtcgatgaagcacataagctgccggatgcggcaaagcagatgttcgggaagagcctctgttatgacgatatccgggaaatctgcttttatcttgggaaagagtaccaaggaccggagataagaaaactgtctgggacgatccgtatggtgctggacatcataggagaaaaccacagaaccagatatgggataaaagaagaattccacatgacagaagagtgtgcaatgtatttatgtgaggggatacagaccatgaataagatcatagaaaaattagaaaagaagattccgaagtggatcagaaacaagctggaagaaaccagaagtgtgttggaatactttttccatcaggataagaagtatgtactgcatctgaagcaggaccatgatcacaggattatattgtgtgcatccagcagacggattccacagtatctggaccagatgttatggagcagaggaatgggagcgattcttacaagcggaactttaaaaaccggacagggattttcccacattcggaaaatgacaggattacagagagtgcggagagtccgggaatatgtggcagactccccgtttgaatatcagaagaactgtcttttatatctgcctaagaatttgaaaaaatgcagaagaggaagtcaggaagaggcagagatgatagcaggccatatccattcactgatctgttcgacttacgggcatacgctggtgctgttcacatcttatcatttgatgggaaacgtttaccagatgttaagggatgaaattccgttcccgatgatagaggtgtggagacattcaccggaagagatcacaagatttaaacagatggacaatgctgtcctttttgcagccggctcctgttgggaaggagtagacttccctggagatatggtatcttcgctgattatagtaaaactgccctttgctgttcctgatcccatcagcgaagcacagaagaaggaatatgccagcctgaaagattatattcaggcagtgattgttccagacatgcagaaaaaactaagacagggattcggacgggcgctccgcaccgagacagatacttgtgtcgtgtccattttagacgagcgtgcaggagaaggcggcaggtatcatgaggaagtgatgtgtgcgcttccaagctgcaagatggcaaaagacatcaaggatatccagcactttatccgaaaccggaaaggcgtggaatactacctgtaaccgttcgtggttctgctacagaaatagcagattttgcgcgaaaagtttggtggtatttcaagggcgttttcggtgggattgttggtattgatgaatagctatttcggcatgaagtgggtatactgtgtatagcgttagaggaaaggaggcagcttatgatatacaaggtggaaacgataaaagatggaacagaaaaatattttttcatcagaaatctggaaacaatgagtattgaagaactgccaagtaaatatctaatgcataagattaaatgtaaatgttcaccaggaagtattctgggagttgatctgaatgaaaaaagctgtcagatcagctattatgatgagaataaagaagagccggaaacgatggaggcagcagtagacaattatcagattcctctgatactgggatattataaagaccgatgggtttacggacaggaagcaaaacggttaaaagaagcaggagaaggagacattgtcacacatctgtttcggaaggccgtgaaaagaaaaaaagtacgtgtaggagaaaagatacatgacggagtatggctccttgccaaatttgtcagtctgatgctgaaaaagtttgaaaagattgattatattacattttctgttccatatacgaatgtggatatgtcaaagatgttaaaggggatcggtaaacatataggtgtgcccggagagtgtgtgttcgtacaggattataaggaaagcttttgccagtatatgttctatcagccaaaagaactgtggcagtatgaatcggcgttattctactgcgatgcacaggagatacgtgcatatatgctcagacgtctgaatacagtgagcacaaaaagcagagacatgttcgtaacagtagaagaagttgccaatgcacatatgagggaacttgaggctatttatcctgtgctgaatgtggacaaggcgaaggatgccgatgaaagctttaaatcatttattcagaatgtgtttgataaaaaagtagtatcgtcggtttatctgacaggggaggggtttgaaaataactggtatccgaattctctgaaggtgttatgtaacggaagaagggcctttctcggaaataatctttacagtaaaggtgcctgctattcgtccatgcgttatgcagacccttatgacgatggaccgatttatcttgatgggacgaagatgacagaacagatttgtctgcgcatgcgtattgcggggcaggaaggctggtatccgatcgttgcatggggaacacattggtatgaagctgatggacagtgggaagtaatactggaagatacatctgatattgagattcatatagagtcactggatggagaagatcttaaagtggaaactgtttctttggaaggacttccggaacgtacggattattcgttgaggcttcagatagaagtgatgtttctggatgagcgtacgtgcagacttcgtttcaaagatgtgggatttggcgagttctatccggcatcagacttctttgtagaaaaggaattacatttaggaggtatcaatgggcagtttaattctttgtcataaaaaacgggccaaaagacctttcgaaatatccagggtgcacatgcggatttatacaatcgaagaattgtgctattacatctgcaataatctgtatctgattgattatacaattgtgaacgaacgattatgcagatggatcggtgatgaactggaacttccggaattgtcatccgaacttcgaagacttctccgggaaaatggttccatggaagaatttgtacttacgattctgaaagaatctaatatatatgcgacagctgagatccacaaaatgcaaagtgttctggagcagctgcagtcacagagagatgtagaaaaagaaaaatataaggcggacagcttacagaacagtaaagaatatgaatcggcgattcttgtatatcagtctattattaacagagattgggatgaatcggtagataagaagttttatgggcgtgtatatgcgagtattcttcccatgcctgcatatacttcacctctgtcttttcacttgctttgatctgacaaactcgtctatgcatctcttgaatccgcttacttttacactcacctgatacttcatccgtactacgttccatatacttcaacaattctatcaattctgatgacaccagctcgggatgtttgcccctggtattcagaaatatgatatccaacatcgtctttacattttcctgatcatccatcgcttcatcgaacagaaatttatccagcaagtttaattcttttaatgattttctttggttcataagcagttctcctctcttgtacagatataatacctgcaaagaagaactgtttagctttatgcatatgataacacagaatttatatatataccagtatataccgttatcttcttttatcagacatgtatttatctgttttttataattttcatcttggattcttacccgattgtttgggcttgaaataaatgaattggtaaatatagatgcgttgcagatattagaattcatctgcgtgttgataggataacatgctctattcatgctttcaatatatattttagaaatgctcaatttttgtaaatcttctacaaattatccccgggcacttttactccacagacatatattatattgtagacacatatatgaaaggaaggttaaaaatatggctcaatttacgaaccaggcacaactccgttacggaaattctgttactaattcaaatattgccgtcggtgagattctcgaagtattgtcaatctcgaaaactgcagtaaaaaatacctatcatccgggaggtaccgtcacctatattataagtattgttaactccggtaccactcctattacaggacttacactcacagatgaccttggtgcgtatgcattttctactacttcactgacaccgttaacgtatctggataacacggtaaaatactatacaaacggaacgttacaggctgcacctgctgtaaccgcaggtcctccgcttgtcttctctggattaactgttcccgcaaatggcaatctgacactggtctatgaaacagctgtaaatcaatacgctcctctcaccaatgaatcattcattaccaacacggttactgcaagtggagacggcattacttctatcaccgctaaggaaacggtaaatgcagaagccttgccgctcttaggtatcacaaaatctatcagtccggtacctgttactgaaaacggaagcctgacctacacgttcctgattcagaatgaaggaaacgttcctgcaaatgaagccacggccgtaatcgttaccgatacgtttaatccaatactttctaatctgactgtcacctttaacggaagcacatggacagaaggtgaagactacacttatgataaaactaccggtacttttgctaccggtgccggaaaagttactgttcctgcagcaacatttaccgtcaacgagactaccggtgaatggagttctaatccgggattcagcactctgacaattaccggaacagtataagcattaaaaaatggcaggagagaccatctgaataatgtcagatggtctctcctgttttgcgattattttccgatttaatcttctgtatcatattgttcctcaatgatatgtttcacctctgaaacatccatatccaatacatctgcaattttctcaatggacatcttatgattcatttttctgagcaattctcttttttctttttgtctttccagcaatttttcttcccatgcctgcatatacttcacctctgttttttcacttactttaatccgacaaactcgtctatgcatcttttgaatccgttcacttttgcactgttctgacacttcatctgtactgtgttccatatatttcaaaagttctatcagttcttgggataccacccggcggcagcagtttactgtcgatgattccctgatacaaacgacttcttttcggaagattatgcgtattttctttctgcgcctccacttcgtatatcacatcatcttcatccatagcatagacatctaaccggatctgccgattatccgtagacgttctctgttccttctctgtctgcggtggatgcttcagattcgtcttttgacttaatatgatgtctaacatcgtctttacattttcagggtcatccattgcttcatcgaatagaaatttgtccagcaagtttaattcttttaatgattttcttttgttcataaacagctctcctttcttatacagatataactcctttaaaagaaaaactgcttatttttatgaatatcatagcatacattttatatatataccagtatatatgaacaactttctttatcaggcatgtatttatctgttttctgtggttttcatttttgattaatgcccgaatatctgggcttgaagtaaatgaattgataaatatagatacgttgcagatgctagaatttatctgcgtgccgctagaataacatgcctgatttttattttcaatgcaatttctagaaatactgattttttgtgaactttctacaactccttcatcttcccaagaatctcctgataaaacacttcctgatccccgccatttctcatatcttccagaatcattccatctttcagaagaatcagcctgctgcaataacttgccatcttcggatcatgtgttaccataacaattgtcttgccaagttcccgattgatatgactcagtgtatggattaccacatcaccggacttagagtcgaggtttccggtcggctcatccgcaagtatcagatccggattgttgatcaatgctctggatatcgccactcgctgcttttcacctccggataattcatacggcttcttgttcatcagatgtgtaattccgaactgttctgcatatttctgcgattcttccatacactctttcgcactcttcttatccaggatcttcggaagcatgatattttccctgacggacagactgtccatcaaatagaagtcctggaacacgaatccaatctttctccgtcgtatgtccgcaaattcatccttccacaaatcttccgtatcatgttcttcaaagaacagctttcctccggtctgacggtctatcatacccaatagtttcaaaagtgtcgtctttccacatccagatcttcccataattccgacaaactcctgtctctggatagaaaaatttaatcccttcaggacgtggacctctttcttcttttcaccatcttctccatactgnnnnnnnnnnnnnnnnnnnnnnnnnnnnnnnnnnnnnnnnnnnnnnnnnnnnnnnnnnnnnnnnnnnnnnnnnnnnnnnnnnnnnnnnnnnnnnnnnnnnnnnnnnnnnnnnnnnnnnnnnntttattttcattcttttctaatttttcattcattacaaatctgctcccttttcaatctttttcacaatcgtatcttccagccacttcagattcagccactgtaatatgaaatatataatccagagtacacctgcatttatcacataattcttcacatcattcagatgataatccctgagtccaaatacaattccagaatacagtaccgtaactataacggcaataacagatgggatcgtcacaaaccggctgatttcctttttctcgatgcagatccgttccctgcgattcattcccagacggttcatgaactgataccgtttccgcatatccggcagttccatctgaaccttcatatgaagtaggagcatactgatcacagataaaataataagcacaaatccattcatcacacattcaaggattcgctccatctgccgctttttcgctgcttctgtcttcgtatatgtactttttacaagcgaatcaaatgactcatcatatgcatgttgctttgcaaaatctattgtcaactgatctgcttttttctggtatttttccggtacatttgcaaggacaagtttcgtcggccattcatggatattttcttccaataccgcatccgacgtttttattttttctcccgtattcatgtctgtcattttccaatagtcttttattttgtcaaaatatgcatcagcgaatacaataagattctcgtattttccctgtttgaatgcaccgatcagactcgaagtctcggagcctgtaatcgtccgtaccggataataagtctggtgctccattgtatcaaagccaaacaatggctgtccgatatgcagattcggatgtatcatcaactgatagtgatcaattggtttcgcctttgttccctgatcttgctgatacacgacataaattttctttccgttcttgtcaagattcagatactttttcggtttttctccgactgcattctttaactttcgataactgctctctgatataccgatattctggccttgctgccagacaagatcaaatggtccttccagacgttctgtattatcaatcgttgttgcccggaccatcggaatactggtcacttctgctttgcattcttgcttaagcttttcgataatccctgtatcattactattcgcaagccatacatagtcgtatgggtacagcgtatccgtcttatctgcgattctgttagatacaacttttaccgagaaaaaggacatcacacatacatgtatcacgatcataagtgtcagatactttacagttgtctggtatctgtgtcgtatcatatgttcttccggaagggttcgcaggtattgatccatagacgtttcttttttacgcaggatcatggcacctatattatacagaaaaacatacaaacacaggaagaacccacacaaaagaaagatactctctgaaaatcttctctgtgtatacagatacaggacgattactcccagcagcccgctgatcaacgcccctgcttttctgtatattcccggaatcttctcacttttcaccgctgcatttctggcatcggcggaacgttctcctgcatggatatccccagagataccaaaagcaaacaaacagataacagctatcacgattgccgtgatcagatacaccttccacgatacctctgatttcatatcgattttaggaaaatgctgtataacagcggcatatatgccaaacaaaatggctcttccaatcacaaatgccgtcaccagtgccaccgcaaatccggcaagtaattctccgatccaggaccagaacacggcattgctccgcatgccaagtgtccggaaaatcccatcatccgccatccgttttttccggtagaataccatgacaaccgtaatcaaaaacaatgatatcagtacgatcacgatcaggcagtccttcataatctcagtcagcccaagccctagtaattcattatcatatccatagcttccggaaaatgcctctctcattccaaatccaatgaacagaaatgctgccgataacagaaccgatacaaataaaaaagaaaaatctctccagtgatatttaaaattctcccacagcacatggtaataaagcttcgaatatttccctggaaaatataatcttcttttccgttcctgtttataatgcttatcattttcctgagttttcaggatctgttcaccggattcttcccattcttccatggatttatgcatcagtaaccgtatccccgtccatatcggaaatactgccagatacccaagtagatacatcggaaacacctgtatcgtacccgcactgctccatgaactgttaagtccaatctcggccactaccgacagcattgcaaataatccgataagttctatgatagataaaaattttatttcccatcccttgatgttacagataagccgtattgtttcgattacttcaagaacgacatacagcataacacataccgtgaatgtttttgccagtgtatgaatatccagtggtaatgcatctgctgctccgtctaaaaacgtcgtgttatatgtatctgcacaactgtgatttctcaacacagcaattacatacataataaaattcttccgttctcccgttatattcatccacggaaacagaaaatatatctgaagtatgatccctagaataatattcatccgtctctttttctcttccattctcattcctcttccgcccctcttatatcatatatcgagatgatacagaccagatactccccgtaaattttatatcggaatatgccgtcatattttctgacaatatcctgtatgttcttcattccatatccatgaagtatctcatcttcttttactgatacaaattccttctgattctgcaccggcatttctttaattgcatttgaggtctcaatatataataaatgattcttcttttttatcttaatttttatccagcgctttttatcttggatccgttcacaggcttccagcgcattatctagaacgtttccaaaaagtgaaataatctccctgtctgaaaacggaagggttgcaaatacttctgtctcaatctgcatatccgtctctttctcttttgcatctttcgtcttttgattgaggatcatatccagcatgcggttacccgtccagatctgatagctgtcatccagcatatcatcacttaattcattcagatactggtgcagtccttcccagtctctctcctgatcgtattttttcaatgcaagcaggtgatttttcatatcatgtacaaccttccggctctttaacatttcctgatatttttcttccagcactttcacttttacctgcagcaactgttcgtcccgctctttcagttctgtcttatgctttgctatctccgtatcccatgcagccgcctcgatatccagaaacatccagattccaataatacctatgaatatcaccatatacatatagattctaagcttgaacagcgcactgtcatccagatagatgtatgaagcatcaagatataagaaaaaaagaacgatggcaagaacccagacatacctgtgtatatcaaacgttttgatccctttcatatgtctgtacaattgccatagttcgatcatctgcatcacaatcataaatgctatgatcatggtaaatgtcactgccgcaaaaccggaatatttccataagattggatgcccagataagaaaatataattatatgccttgatgcagctttctttccggaatatctcgatcagatacacgtgaatcgtgtgataccctccgtctatacggatccatggaaagaagaaatatatttgcaacagaatccccatacaaacatctgcttttcgctttctcatccattctttcattctacatttctccaatattccatgatccgtgtcttcacatcctgaatagtctctgcccctgcctgaatcttaatcccgtcttctagatagactgcatccgttgtgatcctgtctacatgatcgatattgataatatgacttcttccggcaaatataaaagccgggcttttcaaatcttcaaaaatctgatgcagtgccagacgttctttgtatgcgccatttaccattacaaattcaacatacttctgccctttgaccttacggatacagataatgtctttatgatataattttctctggtccgtcaccccaccgatccagaagaaattctggctctctttttgcttttcctgataaattttctgtaatactgccggcaaacgttctttcatatctcttttcaaaatatactgatatgcctcgaggacataactatccactgcaaattcagcgtacgatgtcaggaataccaggcagatatctttttgttctgcctttaaaattcttcccagatcgatcccgcttttccccggaagatcaatatctgagataactacatcgtaatgcttcttaacttccagaaattcttcggctgttttatatatttcggtggttatatcctgcaccttaagtttctcgaactcccggctaataagtctttccacttcctgtcttgtatgttcttcatcttctatcattgctatctgaaacatttatattttctccgtatttattcacataattattgcattcattgtaccacgatagttacaaatattgttataactggccatgaattccgggatttgtggccatgaattcttgaaaaaacgtctgctgatacagaaaacttaccattggcaaagctccttacagatgttttggcagccaagcagctccttacgaacacatggcaacacaaaagaactgctattttaagactttactcctaaaacagcagttcttattttttcaatcatttacttctaatattttcaaccagcagctcgtacttttctcatttccgatagatattccatctattccgctttattcagtcccatgtcctcactcgcttttgtcacaggaacttccaccatcacagagttgtcatcaatctctaccgaatatgtcttatggatcaggcagttcaccggatcttctgttgcaacaactactgcaagtctgtgtcctggctctacggtatatcttgtcgtattgagatatacactgtaatcgtgatattcgccttttttaagctcgatactgttctgtgctgtctccggcgcataacctgcttcaggattacacagatctgcaaatgcacgtgtgatcacgcggtattttttatgtacggtattaaattctgcctcatcaaatgccggaagatctccaccattaatgattccgccttcttttactgtcgtgaccggaacaatatttctttccggatctacagtctggatactgtcgaattcttcgtcacatacatcacagagaagcactgcaatctctacatcatccattttgccggatactttggaattaccaagctgcatggtcagtgtatccacatcgtttctgttttccggatcgaaatctgtttcgatatttccgtcttttaatgctgcctttaagttcaggcataccgttccctgtacagtcacggctttttcaaatggatctgtcacatagcgctgagccatatttgtagacttcagtgccatcacatcatcgaagttttctgcactgacaccagctttttcccagtctgtatcaatcactgtcttactctcttcttttgaagtaagcttcatggtatactctgtttcccatgcactttctgtttcccattttttctgatcatagttcgtctgagcaagtacttccggcatcttttcggcaccattttctactccgtacagataatgggatatccattcatttacgatatcatcatagaattttccatcgatcaggattccgtaattcttattcgccatggtcggtgtgatatgcggcccctgatgaaggatcagtttcactgtctgccctgcctgttcgaatgcggtatacatcatttcgaactgttttgtagatacattttcgtcgttgaatccatgtacaatcagtgcactgcacttgatctggtctgcatgcagacgatagtttccggctccccaaaattccggatcatagtcgaatccgcattttaactgctgaagacttaattcatgatggaatgctgcaatatcatccaactgtttctcagataatgtctcatcgttataacggctggaacagaaatatgccaggaaactgttcagcatctctttcggccagtagcgctgtgcaccctgcatattctgctgtgtataccagtctgcgatacctgcaaccggaacgattgttttcaggccttctacgcctgtggttgcaactgcaaacggcatggttccggcataagatcttccggtcatggcaacattcccattcgcccagtctgccttcgtctcgatctttccttcacggtctgcgtaagccactctgtcgccatgcagccattctacaacagatttgaatgcatctctttcatactctgaaccgacatagttgaatccatctgagccaagcgctccgaatccggcacttacaaccactgcaaagccgcgcaccagataataattgaagttatccagattttcatataccatgctgttattgtttcctttatccggataataccagtctgccggatctgcctttaatgcaagatccatggcactgatcattccttccgggatacgtgcaggcacttctttgtcaagatctgcaaaatcaattttgcggtattctttgctttccacttctttcatatgatcgtatccgtctgcctgtacaccggcacaatacggacgtgcctcatataacgttgccgccttataattgccttctacggcacttcttggaacctggatgaatgctttaacgagatctctctttccgtctccatccatgtcatagtcagattccacatatacacagtatcttacgatacttgatgtcgcaggatcgtatttttctcctgtctttccgtctgtgaatttgaaaacaggctgtgcaagtccattttcgaataccggtactttactgtaattcttttcttccattgtaaaaacctctctgattcaatattttacctgagaatattgtaccacgcatttcggaaccgggcaaattttctttctgaaaatatctggaaatgactgatacagaaaaatgcgtaaaaacagttctttatctgtttttacgcatctataatatatccaaaatcgtatcatacactgacggattgtctttgatcacaatcgccagtttttcttttgcctgattcagctgatgaaaaagaagtctcacatttgattttctgccttcactcgttgttataggggttatttcataagaagcttcactaatctttcccgcacggagataaccgtcctcatcataataatactgttcatccagtacggctaccaggcggttcacatcccgcattgccggattctgatagagatatccccgtctcgcatagccttgcatcaaacatactgcttctgtatcatcattcgcatacaccacttcaatattaggatagcccttctgcccttttctccgcgacagatccagcatgttctgaataaaggaagaaagttctgcatttgtacggatacggttcgtcatatgaaagctctgcacatccggcaggctcgcaagtctttgcgatatttcacgatccagttcttcaggcgagatcatgtcttccgtatcactggagaagattatcggaatctgctttttacattcttctaatatctttaattgctccacagatagcagatgtgcctcatccaccagaatagcactgtatggctttaagaatgtatcaaacgcttcttccgcacacacattttctgtcatcgtctgctttgctgtctgaagtgataactgacgatccgacagaaaatcaatccggcgcagacgtttatgtaaaattctccagtcctctcctgattctccgcaatgaatcatgcagactctctgacgtaccgacagcttcatcgcaagatcatacagaagcaatgtctttcccgtccccggaagtccactgaaccagtaatagtcggaatgttttgcacggattcctttcaggatctgtcgttcgatatctctttgctgtgccgtcagaaaatattctttctgtaaaaagcgttccggctctctgagcggtgagatcagatagagttctgcgcggaacagttcttcgatattcccgtcataatccggactttctcttttcaaagctctgcataattcgtcccagtctgcctctgcgatatgatcatgattcgtcagtcttaccagacggttctggctgctgatataagtatacgaatgaatcgttcttccaagcaccgacagataatagcggttctgcagaagctgtctgcagatagcctcatctgataccacaccactttttaactcaatatttacaatctggtcttctttgatctgaagaagatcaaattcttttcccagtctcggaatctgaaacgaataaaagaaacgaagtgcatatacatcctccatacaggtttccaattcggctgtcagtgctttcatactttccagttcccattcccgcattttcagaaaatagtctcttccggataactgacgttccagtttttgcagctgttcgatattctgatttcttgtgatcgtataaatggatatggatttcattttttaatctttaaccctcttagatattctttctgctctggcgtgatccggtaactttcgatagctttttggatcgtcttattatgcgtccagacatctaatttttgcttttcgataaacgggagaatcttatcatactgctttgcaagcgccgtcgcaaaataccatgcacgcatcatatttacataatattcttccgaacggatctgtgccactttctccgggtactccatctgaaatgcatcttccagataataacgcatcagcatactgataccgaaccggatggtatatgcatggtcggattccatccatcggtatacttcatctataaatgtatccagatgtttcttcactaccttgaccgcaagcatatcgcaggtcgcccagttatcaatatacggaagaaaacgttccagttcttccagacatgtgtcatagtctttaatctgttcgatcaaaagtccgtgcaaattattttcttcgtagtactgatgtggcagtatctgcagatattcttttgcttcatccgtttttccatacttcttcgcaaatacacgaagtgccggcgtccggacaccgatgatcttttctttgttgactgtcggcattagttttgcatggaagtcgcggtattttaagtcttgcagctcaaaaagacgggtttgtacgttggttatgattgttgttttattcatattttcatccttgattcttatatttcccatgtcaggcatatgatctttttatttattatatcgctgttgcgatacaatttctattgttttaaacgcattaaacagcacttctcctcttttttcttgccaaaaaaactctcacacaaacccccacaatcaatccaacaacaattatcgcccaaagcgacatctgttccgacatcggcaatgttccccattcatctttgcgcaaaaagaaccataacatataacacaggaaataaatcactgaaaacaccccttcgatccagggattcgaatatctcagcttcctttccgggattttcttatctaggtaatatgcagcaaagaacagtgcaccccatacagcccagcatataatattcacacacataggtccgtgtgaaaaaagaggaacctgcaataccgcaaccgctgcaattcctaatatatatatgatcatctgaattttatacaataacggctcatccagcgatgcaatccaggctttttctgtctcttcctgatagtgttccggttcaatcctttttccaagcatgaattcactgacactgatatccagtatctgacacagtggctcgatcagactgatgtccgggaatgattttccattctcccattttgacacagctctgtctgtcacgcccagttcttctcccagctgcttctgcgtcagatttttttccttcctgcatgtcgatataaaccttccaagttctaatggttcaaccatatgcgtcacctcctgtcggctttattatgccatatttctcccagaaaagcactccacttatggttgaacgcctctaaatgccgctaattctcactattagacgcatgaacttatattttgttacagatttttatctttattttttaattttatagtaagcggccaaatttgtcagcctctttcggtcatatggcgatacagcgaacacatcgcgatgcaaaaaactccccgagccactggtatgctaccctcatataggacaatgaaatataaaagtcctatatgggggtattttcatgttcagaaagagtaagatatgcatcgtgacatccagcaacaaacataataccaagtctttctcatggaccggggtaagccacgatgatgaactaaatagaaaaagaaaacaaaaataaaaatgtattccgcgcaagtaggaaaagaaacaaacttcctgtaataatcagcgttccaacatgattcaaacacttgcggttaaatatattcactgcgatcatacatacattcacgagcataaaaagctccaatataccaagtatcggtaaagaatacaactgaaatacctgaatcagcacggtcatacagatggatatggcaagtgcaaaacaaaagtaatacttctttttctgagtcataatatatcctccttgcgtggaatgatagggttacattcaaaaatagagttgcactaatttagtaaataataccataacaagtcataaatgaaaagccaggaagacattttacataaaattcagaataccctcttgcaatctgtaaaaacatgtgctaacatttaaaacaaattttagtatagtaaagcgatgaaagagactctggactctggaacctgacaggaatgtggtgtcaccgactgagagcactgcttggggaatgaggacaatagggaacactctggagcagactagctgaacaagtaaatatggtaaagctgaatgaaaagtaggttggtacgtagactgcacgttacgcacgaaaagaggaatcttagaaagcactatacagctttgagattcaatgcgggtggtaccgcggataacgatgatgatatccgtcccgggatacaagtatgtattccagggcggatttttatgtttataaccgttattcgtcccgggaagaaaaggaggaaaagaacatggagtatttaacaggtgtaaagccaaaagagacaaaagaaatcagtgaattactggaacaggtagaagcaggagcaaaggtaaaagtcaacggagcagtgcatacgatccgtgacatgggaactgttgcatttgtgatcttaagaaaaagagaaggtctgcttcagtgtgtctatgaagaaggcagtgctgatttcgaactgaaagacatcaaagaagcagcaacagtcgaagtagaaggcgtcttagaagagaatgaaaaagcaccaaatggaattgaaatccgtatggagagcgtaaaaatcttaagtgagccggaagacgagatgatgccgcttgcaatttccaaatggaaattgaatacatctctggaagcaaaattaaactaccgttccatttctcttagaaatatccgggaacgtgcgaaattcagaattcaggaaggacttacaagagcattcagggatttcctgtacagtcaggagtttacagagatccatacaccgaagatcggggcaaaaggtgcagaaggcggagccaatattttcaaattggaatatttccacaaatcggctgtactggcacagagcccacagttctataaacagatgatggtcggtgtattcgacagagtgttcgagacagcaccggtattcagagcggaaaaacataacacaaagcgtcatctgaacgagtatacaagtcttgattttgagatgggctatattgatggatttgaagatatcatggcgatggaaacaggatttcttcagtatgcaatggaactgctgaaaaaagaatatgacagagaattgaaagttcttggggtagaacttccggatgtcagtcatattccggcagtaaaattcgcagacatcaaagagatcgtcgcagaaaaatataaccataagatgagaaacccattcgaccttgaaccggaggaagaagtactgatcggacgttatgcgaaagaagagtggggaagtgattttgtatttgtcacacattatccttctaagaaacgcccgttctatgcaatggatgatccggaagatccaagatatacattaagctttgacctgttgttcagaggactggagatcacgacaggcggacagcgtattcatgattacaagatgctgacagataagattgctgcaaggggaatgacagaagaaggaatggaacagtatcttgcgacatttaagcatggaatgccgccacacggaggacttggaatcggactggaacgtctgacgatgcagttgttaggagaagacaacgtaagagagactacattattcccaagagatttaagcagactggaaccatagcggggagtaaggtataatagatatgataccggtgataacatgtcatgagagggaaatcatatgtttggaaaaagatgtagtttatgcggaggaaagttaaacagtagaggaatctgtacggaatgtgggcttgataacagcaaatcggataagaattaccggatcaaccggagtgattgtgacggaatgccgcttacacatgtacatgaggagaaagaaaaacacagaccggacaggaaagcagatcacagggaaataaatcacaaagagacaaatcataaaaaaagagattacggaaaacaaggctaccgtatgaatgagtctgatatgaccgggaaaaaacgaagaaagcatgtgcagactccggatattacaaaccggagaagaccattgaaaatagtgattttggcaattatcgtgattgcagttttgggtaatctctatgaggaacataagtacgatatagaatatgcagttggagatgcagttcaaggtgtatttcaggatacgggagatcaaaagacaaatgatacggatgaaacagactatgatcattatcagtatgtgactcgggaaatcccgaaagaaggagaaagtgcagactatgaacttacttccggcaattatgtggcaggtgtggagatcccggagggaatctatacagtgacaccgcaagatgactatgacaccgtgcagatcgatgatcctgagaacagcatctatctgtatgaatataccgagggcaagaaagacaagattaaggatatccgtctttataaaggagcgcatcttacattaaattgtaggacaacagtaaaactgcataccgataatgcacaggatgtagaggcaatggaaacggccggacagagtaatccgctcacagaatcagtggatatcaaaggtcagaaaacgttgacggctggaagagatctcgaaccgggaatatatgatctcagccgtgtatcaggggctggaaatgtggatgtaatcatttattcagacgaacaggaagaaataaattcatggagccagtgtctgtcggaagatggaatagacggagagacattccattatctggtaattccggaaaatgcaacaatggaagtgtcagaagacttgaaaataaggcttacaccgtcagaacagattgcatcaacagattattatggcttttataacagataagtttactgaatataaagtataggggaattgataacatcaggaaagaaggagcagaaagatggcaaacaaaatatcagatgagaccatagaatacgttggtattcttgcaaaactggaattatccggtcaggaaaaagaagatgccaaagcagatatggaaaaaatgttagattatatagatactttaaatgaactggatacggatggaatcgagccaatgtcacatgtatttccggtgaagaatgtattccgggaagatgtcgtgacaaatggagacggcagtgcggagacactggcgaatgcaccgttggaaaaagaccagagcttcaaagtaccaaagacgatcggataggaggaaaacggttatggatattacaagtcttacagcagtagagcttggaaagaagatcaaagcaaaagaaatatctgttgtggaagccgtgaaagcctccattgcacagattgaaaaagtagaaaaagatgtaaatagttttgtaacacttgataaagagggtgcattaaagcgtgcagaagaagtgcagaaattgattgatgatggaacacttacaggaccgcttgcaggtgtaccggtggcgatcaaagataacatgtgtacgaaaggaatgctgacaacctgtagttcgaagattctcggcaacttccaaccgatgtttaccgcagaggcagttaagaatctggaagcagcaggagcagttatcttaggaaagacgaacatggatgaatttgccatgggaagtacgacagagacttcttatttcggaccgacaaagaacccgtggaatttagagcatgttccggggggatcttcgggaggaagctgtgcagcggttgcagcagaagaagcaccatatgcacttggatccgatacaggcggatctatccgtcagccaagttcgttctgtggtgtagtcggaatcaaaccaacatatggaacggtatcccgttatggactgatcgcttatggttcttcactggatcagatcgggccggttgcgaaagatgtgacggactgtgcaacaatcttagagacgattgcatcctatgatccaaaggacagtacatcgatcaaacgcgaaagctatgatttcacatctgcactggtagatgatgtaaaaggcatgagaatcggtataccgaaagattattttggagatggactggacgctgaggtgaaagaaaatattttacaggcagtgaaagtactggaagaaaaaggtgcggttgtagaagaatttgacttaagtcttgtaaaatatgcgatccctgcatattatgtcattgcatccgctgaggcaagctccaaccttgccagattcgatggtgtgaaatatggttaccgtacagaagaatatgaaggccttcacaatatgtataagaaatcccgttctgaaggtttcggaccggaagtaaagagaagaatcatgcttggttcattcgttctgagctccggatattatgacgcatactatctgaaagcattgaaaacaaaagcgttaattaagaaagcatttgataaagcgtttgaaaaatatgatgtgatcgtagctccggcggctccgacgacagcaccggaacttggaaagagcttaagtgatccgatcaagatgtatctgggagacatttacacaatttctgtcaacctggcaggtcttccgggaatcacaattccggtaggaaaagattccaaaggacttccggtaggtatgcagttgatcggaaattgtttcgaagaaaacaaaatcattcagaccgcatatacatttgaacagacgaaggcatatgaagcaccagaacttgcaaaggaggacagatagtcatggcaaaacagtatgagacagtcattggacttgaggtccatgtagaacttgcaacaaagacaaaaatcttctgcggatgcagcacggcattcggaggagcaccgaatacacatacatgcccggtttgtaccggtatgcctggatcacttccggtattaaataaacaagttgtagaatatgcaatgggaatcggccttgcaacacattgtgatatcacaagagtgtgcaaattcgaccgtaagaactatttttatccggacaacccgcagaactatcagatttcacagctctatcagccaatcgcaagaaatggctatgtagagatcacagttggtgatacaaagaagaaagtccgcatccatgagatgcatatggaagaagatgccggaaagctggttcatgatgaatgggatgatacatctctggtagattttaaccgaagtggtgtgccgcttgtagagatcgtatccgagccggatatgcgttcatcagaagaagttatcgcttatctggaaaaattaagaacgatcatccagtatcttggagcatctgattgtaagctccaggaaggttcgatgagagcggatgtcaacttatccgtaagagaagtgggaacccaggagttcggaaccagaacagagatgaagaacttgaactcattcaaggcaatcgcaagagccattgaaggagaaagagagcgtcagatcgaacttatcgaagaaggaaaagctgttatccaggagaccagaagatgggatgacaataaagaatcatctcacgcaatgcgttccaaagaagatgcccaggattatcgttatttcccggaaccggatcttgtaccgatcgtgatcgacgatgagtggatcgaaaagatcaaagcaaaacagccggaattccgtgatgaaaaactggaacgttataagaaagagttcgatattccacagtacgatgcagaaattctcacagagtccaagcatatggcggatatctttgaagagacaacagcaatttgtggaaaaccgaagaaagtatccaactggctgatggtagaaaccatgcgtctgttaaaagaacacggcatggaaccggaagatatcagcttctcaccggcaaatcttgcaaaactgatcgggcttacagaagcaggaaccatcaacagttccgttgccaaagaagtgttcgaacaggtatttgaaaaagatgtagatccggaaagttatgtagaagaacacggattaaagacagtcaatgatgaaggcgcactggaagaagtgttaaaagaagtcattgcgaagaatccaaaagccattgccgattacaaaggcggcaaagaaaaagcactcggcgcattggtcggacagactatgaaagccatgaaaggaaaggcaaatcctggaatggtgaatcagaaattgcgggagatgttgaagtaattttttatttaattaattatcgcggcctctcagtccatgagaaaaacttggtgctctgtttgctactaagattccgtgatgtaagctgtttgaaacagcttatttagattatcatattcattgacgtttgtcaagaacttttttaatcttttttcgaccagcttttcagctgttcgaccgctatccttttgccaaactttcgtttatctcaagcgacagcttattaagaatatcataatcagttgtgtttgtcaactgttattttattcttttttcaaaattgatttgtatcaattctgaaacttccgaaacaattcacagcgaatcatttctctaatatataactatctaatatacaatcttgcattcccactcatgcatatcttctatttatatatctctaatactgtcttctgcgttgactctgttacctcacggcctcgtctctcgcgacaactagactaatatatcacaacgggatttgaattgtcaatattatttttatattttctgcaattaagataattctgacaattatcttttgcataatcttccttttcttataaggaacaagttcttttgcattttaatgtttccaaataaaatactcacaaaaaaaatactgacctgcctatttgcaaagtcagtatttttgtttatcttagataattcgttatcggtatactcccttaattaattatctcagcagcatgaatgcaattaatccagctactacgatgatagcaattgcaagaataatgattggtgcttttgacatcttctcttcttcttcctcaatatcatcataaaaatcatcctctaattcctctctgcgctgcggttttggagttggtttctttttctttcttccatcccctactgcaaggagttcatcatatgcatctcgcatttcctgttcgcgtttttcacgtacctctttcggcggtatattcgaatacttctgctcttcaggctccggcttttctgctctcttctgtactttgtgagcactttgtggaattttgaacttctttttgcaattatagcacaacagataattcggatctttttttcctggtcttaattcctgaccacatattggacacttcatatgaatctgtccctccccatagtgtattatttcaaactgtgctttcagacctttcggctgtgtatatcttacatacattgacattatactacatcaatttgcaaatatcaattttttatccaaattattcagattgttttcctaatgttacttcaacatcttttttctcatattcgccattcttgctctgtgtctgaactgtaatttttaccttttctccggctttataatattgaagctgttcctgaagtgcatccattccatctactgttgttccttcaattcctgtaataacagcaccttttgtaataccagccttttctgcaccaccaccggaaataacttctgatacatatacacccgtcggcatattatacatttgagcactgtctgatgttacatctacacccttaattccaatatagcctctttcggattctgcaacttttgtttttgttttctggttcataagattcgtaatcagatcacttacatctgatacaggaattgcatatccgattccttctactgtctcggttgcaatctttgcagaattaataccaatcacttctccgttcgcatttaaaagtgctccaccactgtttccagggttaatagccgcatctgtctgaagaagttttccgtcatagctgtccattgtacgttctttagcggatacgataccggttgttactgactgtccatatccaagcgcattaccaattgcgattacctgatctcccacctgggttttatccgaatcacccaaggttgctaccgcgatcttattcatcgttgaatctttgatcttacttaaaggaactgctactaccgcaaggtctttatccgaatccgttcccttaatatcagcttctacactttcttcatctataaatgttacagtcaatgtactgcttccttctacaacatgattattcgttacaatcaataattctgaatcattctgacctacgataatacctgaacccgcgctctcacttttctgtttctgtgtacctccgaagaaattctgtacctcctgcacgctcatatttgtaatagaaacaatggatggcattgcattctttgcgacctctgttacattagccgtacccgaagaactgttagaagatgttgtcagttttgcactattggctgtcgttgttgtttttgcagttttgtttgttgtctgtgtggttcccaaaacttttccagccacaatattacttgcctgaaatgccgcacttgcaaccactccgaaaaccagtcctgtacataccacttttgcccatcttgaggcgccctttccgtgttttttcttcggaccttgatcctggtttccacccgtgctgtaattttctgtattcatattctgatcggatgtataataattatattgattttccatatctgattgcccctttcatatcttatgcttgtagtttacagctcaattgtgtttaatctgtgataaaagtaaggagatttattgatattcctctaattttttcagttttgttcctatatcacttttgaactttctccacgcatcctcattttccacaaaatatttagggcaaatctttccggtcacatcataatgtcttataacatcattttcatccagatcaaatttcagacacagccatgcacaaagatccaccatggattgatatgtctttttattaaaaattcccgtctcgtccgggtgacagcattcaattgatactgtatcaatattcctgctgtttgaagcatatgctatctcccacgtcggtacacactgaacaatctctccttccagtcctacaacaaagttactgcttgctttcgtaatgtggctatctttcagtccctcgaagtagtcacggttattcatagctgtggcaccgggattcgctgtataatgaaccacaattccgataatcttatttgttgcaatcccaggccgggaatattcattcggtgtcagcagttctacgtctatattcggctttacggaatctatgtaatcacttttattttccgtatattctttcgactgctcctgtttttttaaaattgtcaccacacaaagcaaaaccgttattataataagaataatcaatccttttttagaacggctcagcgttttattcttttttcttttcctgcttcgtttcatttttatctcttttttatctctccatatatagtacactttcatctatcttatcattcatttttaaatgtcttttgaagagattcttatatttttatgaaattagcagaatttgtatacagttgtcgtatcatatacttctccggcctttgtgatcggagattcaaaattttctttatgaatggcatctgggaagtactgtgtttcaaagcatataccatatcctttttcatacacagctccctcttttccttttgatcctgcaaggaaattaccggaatagaactgtattcccggaaggtcagtatacacttccatcttaatacctgtctcttcagattcagcagaagctgcttttctgaatccttttccatttaatacccagttgtggtcatagccgcctgccagcttcagtggtgtataatctgctccgacttctttttcaacgactttctcttttctaaaatccatcggtgttccttctaccggaactaccgttcctgtcggaatcagttctgcatctgtttcagtaaatgcatctgcatctatccacacctttgcgttccatgccgttccggaagcatgtcctgataagttaaaatagctgtgatttgtcatattcagaagagtatcctgatccggaattgcatgataatgaatctttaattcattttcttctgtgattgtataagatacctctattttcacttctcccgggaatccctgatccccatccggacttacaagtgcaaataccacatgtgtatcatcctcttcttttacatcccacattcttttattatagaaatcaattcctccatgaagtgtatttttcccattatcgttctttgtcagctcatatttctttccgttcagttcgaattcggccattccaatacggtttgccacacggcctactgtagcccccagagaatctcctccattctcgtaatcctccagtgtctcatatccaagcacaacatcctgtgtctttccatctttatccggtacataaagtttcagtaaagaagctccaaaatctgataccactgcctccattcctttgctgtttttcagtacataacagcttgctttttccccgttctttgttgctccaaattcttttttcatgtctaggtatctccttttttctttatattttttaatattacttgtatatttattattttcatttatataccaagtacactatctaaatcttattatactctatatattcaccgctgaaaaccttgatgcaaagaaaattttattatattttttatatgccagatctttccaattttttcaaatatgtagttaaaaaggcgccgttttcacgacgccttaatctttctttattcatctacactgtagtttggtgcttcttttgtaatgtgaatatcatgtggatgactttcttttaatgaagcagaagaaatctttacgaatttacctgtctgtttcagatcttcaattgtcgctgctccgcaatatcccataccggaacgaaggcctcccatcaactggaatactgtatcttcaacgcttcctttataagcaactcgtccttctacaccttccggaaccagcttcttcgcatctgtctggaagtaacggtctttgcttccgttctccattgctgcgatagatcccataccacgatatactttatattttctaccctggaataattcgaatgttcccgggctctcatcacatcctgcaaagatacttcccatcatacatacatttgctccggctgcgattgcctttgtcatatctcctgaatacttaattcctccatctgcaatgattggaattccgtatttatctgctgcttcgtagcaatccataaccgctgtaatctgaggaacaccgatacctgcgataatacgtgttgtacagattgatccaggtccgattccaacttttacagcatcgacaccagctttgatcagatcctctgttgcagctcctgtagcaacattacctgcgatcacctgcagatcagggaatttactcttgatcatgtctactgtatgaagcacgtttgctgaatgtccatgagccgaatcaagaacaaccacatcaacctttgcatctaccagtgcctgtgctctttcaaggcaatttgctgtgattccgattgctgctccacaaaggagacgtccctgagcatcttttgcagataacggatatttaatctgtttttcaatatctttaatcgtaataagacctttcagattgaaatctttatctacgatcggaagcttttcttttcttgcttttgcaagaatcttctttgcgtcttccaatgtgattccctccggtgctgtaataagtccttcggaagtcatcgattctctaatctttttagagaaatcctcttcaaatttcaaatcacggtttgtaataataccaactaatttctttccttcagtgatcggcacacctgaaattctgaatttcgccatcaggttattcgcatcttccagtgtgttatccggtgacaagtaaaatggatctgtaatgacgccattctcggaacgctttaccttgtccacttcttctgcctgctgttcgattgacatatttttatggataattccgatgcccccctgtctggccattgcaattgccatgcggtgctctgtaacggtatccattccagcactcatcatcggaatgtttaacttaatttttttagtcaggtaagtagataaatctacctggttcggaattacttctgaatatgacggaaccaaaagcacatcatcaaatgtaataccttctccaattatctttcccatgatttgaacctctctttcttttgtttattcatacttaacagctatcttagcgaatcacacctacatttgtcaacatcttttgaaatgtttttattttaatacaatattttcttcagtttttgattaattttctgattactttctgattacttttctaggtgctttaacaaagaatccttcaacaattgtctcatttggttcgaacaaaaccttgcacacttcgcctttatttgaagcgatcagcgcataaattttcgcatctttttttccagatgtgtaatcatatgttttaatctttttatactgcattaattctaccgccccgaccggtgccagaagttccatctgatctgcatctacagaaaacatcctttttcttctggccttattcatgattttgtcaatatcaagatcaccatttacaaatacatactcatactccacattcagattgcggaacatcagcacatcgatcacgatcatcacaactggtaatataattcccaccggtataacaaaaaccaaaagcactgacacaacagttaatgctatcagtcccactttcttaagtgtatcctttgagtccgcctgttttttaatcagctgctctgtgtaaaaatcatccatttttctttcctccaagtctgctttaagctatgtctattgtagcacacctgacagtaaaaagaaaactcctctgacgaggagttctcaaaaatttaatatatataccgtttatgatttacatcatacccatgcccggatttcctgccggcacagctggtgcatcttctttgatatcagccacaacagactctgttgtaaggagtgtagaagcaacagatgttgcattctgaagcgcacttcttgtaacctttgccggatcaagaattccgttttcaaccatatctacatactgttctgtcagggcatcaaatcctgttccgacttctgactctcttactttgttaataataacagcaccttcgagtcctgcatttgcagaaatgtggaataacggagcttccagggctttcagtacaactttggcacctgtcttctcatcgccttccagttcttcaattgccttagcaactgcttttgatgcatggatataagctgatccaccaccggaaatgatgccttcttctactgctgctcttgtagcattcagagcatcttccatacgaagttttgcttctttcatctcagtctctgttgctgctccgacacggataacagctactccgcctgcaagttttgcaagtctttcctgcagtttttctctatcgaaatcagatgttgtctcttcgatctgagccttaatctgtgcaacacgatctgcgattgcattcttgtctcccatgccatcaacgatgactgtattttctttctgtacttttacagattttgcgcgtccaagctgatccatagttgtatctttcagttccatgccaagctcttctgaaattacctgaccacctgtcagtgtagcgatgtcttttaacatctcttttcttctgtcgccatatccaggtgctttaactgcaacaacattgaatgttccacgcagtttattaacgatcagtgttgtaagagcttctccttcgatatcctctgcaatgataagaagtcttgctcccgcctgaacgatctgctccagaagtggaaggatttcctgaatgttagaaatcttcttatctgtgatcaggatatatggatcatccagattagcctccattttgtccatgtctgttgccatatatgcagatacatatccgcggtcaaactgcattccttctacaaggtccagctctgtcttcatagttttagattcttcaattgtgatgactccgtcattagatacttttttatattttataagtcgaattcggtgatacacgtgtggaagcatgctccatattataaatattccatttatcagcagactgatcatataaaacaaaacttccagtgtagtccccaaaattggaagaaagatttagctgagtaatattcttttcggttgtgtcaaaatgatacccagtctgatcagaagcataagcagaaagtatgggaatgcatccaatgatgatagtagagacgaatatgcatataagatatccacgaattttttgtttaaaagtaggttggtggaatgatgcaatatttaaaatgcgtccttttaactgttttatatttccactaattcccatagtaagagggaatggagacagagctattgtttcggcaaagttaatcagtgtatttccatatgacttgtattctgtttctttcaataattgtaatacagcactgtcgcaggcaagttcccgttcctgtcgtattctttttagaaaataccagattaggggattgaaccagtagaaaacatttactgtatttatcaaatatccaattagaatatctttatgcttgtagtgctgcagttcatgaagaagcatatagcgaatatcagttgcgcttatagttccagcgttaaaatctgaaatcaagtgaattggaagataaatgcgaggatgcaggaaaccagccaaaacaggagatttcaaaaatgctgtactataaatcggaatggtatgcttgctgttcacttcgtttaaacattctatataaagagcgtttagttcttcattttgaagaggtaaagcagaactatgtaaggcttttacttgttttactgagcggtagagaagaaaaaacattatgaatataccgatactccagaaaaatacaagtaatgtgtgaataaaagttggtatttgggtgctgacagagacagcaaaatcatttattttatccaaattataaccattaccagaaagaaaagtggtttgaatgtcaccattggtacttgaactggctgtcagcaaatgtctccacgatatagaagatggggcagagtttatcggtaaaaagggaacaattagaacggcaagaaatataatcgaaagattatattgcatacatgcggataattgcctttgcaataaattttttaatcccagtaaactacctaaaaaaatacaaatgatggcattacagagtaaaaatcgaaaactaaaatatatcaaaatatgctcctcccatggttaatgattggaaagaagattccgtaagctggcaatgtcttcttcagacaatttatcatcctcaatgtaagaggcaagcatagaagtgatattatcattataatatcgctttaaaaaagaattactttcctgccgaatatattcgtcttccttgaccaatggagtatagacaaaaacccggctttgtttttcataggttagtgcttttttagaaacgagacgtttaatcaatgtctgaattgttttaggactccaactggaaatttgtgttaatttttcagtaatttcattggtgctgattggtgcgtatttccaaacgattttcataacttcaaattcagcttctgaaatttgaggcagattgctcatgtgatattcctccaaatcttacaaatgtaataaaaatattatatatcttaaaaggttattctgtcaacgaaataaaaacttgactttaaatcttacagatgtaataatagataaaaattacacttgtaagatttgaaatgtgaaaggtttttataaaaatgggaagggtagttgttgtaacatttgatgaaaatgaggaagaaaaattaaatgaattattacattttctgtctgctaaaaaatactctgagatgcctgataaacaaaatagggtacttgattacggagcattaaaaataaatgcggaatatcgttctgtagaaagtaatggtgagctggttcaattgacgaattatgaatttgaaatattatatttgctggcaaaaaatccaggacggatattttcaaaggaacaaatatatacacaggtgtggaaagaaccatattatggggcagaagataatgttatgggcataattcggagaatcagaaaaaagattgagccagattctgcaaaaccaagatacattttaaatgtatggggtatgggatataaatttaatggtgaattgatgaaatgatggaatataaaattgggcataataagtaaagataccaaaaaaagcaggagaaatttttatggaaaatgatatttggaatgaaatatcctcttttttgaaccagttgcgttgtgagaatataaacagagaaagttatatctatttccaagaacttgcaaatattcagttgaagaagaaaatggaaaaagaaaaggtgaataaacttctcgatcatataagttatgaggacagggagaagttgaagcaatatggagaaattttggaagaagaagcgtttgtgtcagaacaaagggcatattgtcaaggatatgtagattgtatnnnnnnnnnnnnnnnnnnnnnnnnnnnnnnnnnnnnnnnnnnnnnnnnnnnnnnnnnnnnnnnnnnnnnnnnnnnnnnnnnnnnnnnnnnnnnnnnnnnnnnnnnnnnnnnnnnnnnnnnnnnnnnnnnnnnnnnnnnnnnnnnnnnnnnntaagtgtgtcgtggaggaaaatgtagtatttgatagataaaaggatgttcgtaaagaagaaacagttatgttatatcaagttgtaatgatatagcataactgtttttaacatatggtaatagtatttattccactaattttaaatatcggtaattatcagctatttatcggtattttacaagttttattttgtatcattagtagtgtctacgttagaaataaaaggattagaatctagcagagctgtcgtagttgcaagaattacctgtaactgataatcattgcactgatttaagagccgaagaatctgatcatatgtagaattatttttattttgatttggataaacgtagtcatcagcagaaatatttaaagtctgcatggttttacaaaataattccagactgggaccgcctttatggcgttcgaggtctccaagataagccgccgatattccgagtttttcagcaagagcttcttgtgttaaatgcatttccatacgcccttgttttactaaagtggcaaataatgtttttggaatatccatgtttgtatacctccataaacttagtgtattacccaaaatttgaaaagtgaaaagggtgtaacattagaaaaaacacagggtattacccgatgaatgagaaagcatacaaatctctttcggttaaaaaaacagattccgaaagagcagtatttgtatgcttattttcttttccggaatctaaccggagaaaatatggttcttagcaagagttcagctaaaaaattctgttcaacagaaggtattcaattaaaaaaatctcaacaatttcattagtaaatgttggaattgaaactagggtaagagccaataatgaatccagggtaataaaatatcgaattaaatgcgtccataggagtgaaatctgtcagggcgttttttgttacctaaatattgagaatgagcaattcaaaataaggtcgattgttcgtattcgtgccccgcctactgatctgaattcaaaaaaaattcagattggaggaaaggtcatggaaggcagacagcctaaaagaagaaaagataaatataacccatatgaaatctatgagaaggacggaaaatattatgtttcatttcgtaatggtgaaaaagagtacaaggatttggaaataggaaagaatgtatatgaagcttttaatacgtttgaattgcaggatgtgtcgcatatgaatgttgtggacaggcatctggaacagtcagaaatctgggattccagtttatatgaacggatatttcagaaagaagaaaatgtagagaatacggttctgaataaactggaagcggaacggttacatagtgcaattcagcagttgtcggaaattcagagaagacgattgatgaagtattattttgaagataagaaatatgagcagattgcacaggaagaaggatgctcttttcagatggtagcaaagtctgtaaaagcagcaatcagaaatttgaaaaagattttgagatagtgggttgaaaaatagcatttaagtgaggaaacaggtggaaagagaaatattttgatccacctgtttcttcttttgtcacgaaaagactggggagcgggaagaaccttgacaaattcatatacattcatcaggcacattcctgttgttatcgtgatgagcgtaagccacattaacaaatacgccataacacaggctgggtaaagacagcgaaatcccacccgtatacttccttttggtttcagtttgtattacccggactgttgagcgaaaaatatctggttataactgtcagattgcttctggcagggcgatgacagacaacaggcataatgatactcctgtccggtcataaagtcgtgtatacaaaatatttctttgatgccgcaacaagtgagggcagcttcaggagatccctggagaggaaaactcccaatcccatatatttattttagataaaatcctgtggagctgattagcagtcagccgtctgatgatttcccaattacaagtcggggcgtcggggacaaataggcttgtattttacatatttagggataacaacagttagaaagacgagaggagatatagcaaagatggaagataggaacgtcaagcgtggggatatttatcacgccgaccttgatcctatatttggaagtgaacagggcggttatcgtccggtgctggtgattcagaacaatataggaaataaatacagtccgacagtgattgtggcagcaattactagtaaagaaaaaatgaaactgccaacacacattgcagtcccggaaatggaagggttagaaaaagattctgtagtgctgttggagcagcttagaactttggataaaagacggttggaaaattatgtgtgtaccttagaccgcactgaaatggagaaaatcaataaagcaatcaggagaagtaccgggataccgaagataattgaaaaaccgttagtcgtgagcctgtgcagagtatgtgcaggcaatttttatgatgtgccgggacattatatccggcgagtgaatccagaacagcgatataaggatacttgtatgttctgtaatgtccggaatgggtacgactattatataggaagaaagaacaagtaacacgtaaaagtcaagtgtgcgatttgaaaattcgcacattggacgatgcagacgaaaatggatatcttagtggtgtaacgtttttagatgttacacagctaaaaactaccggtagtgaagcgcaaagattaggacgaggaggataacgtcatggcaatgatagagaatgaagtggaaaagaaagtatataaagtagaagatgttcagaatttgcttgggctgggacgctccaaggcgtatgaatttatagaaaatgtttattatgatagaaaaccattccgggtgttgaagattggcagatcttatcgtatcccatgcaattcttttgataggtggctgaatggagacgaggagagagaaagagtgagagccgaatgaaacagaaagaaacgcagcaggagacaatgtcaaaggaaaagagagttgtcttttttgaaggaaaatcatggtatcacagaaccaaagagctgcaggacgatctgacgacaaaatatgggaaaaaaggtggatttgaaacgccggaagaagcagagaaaagttactgggaatatgaaaagagataccagaagaagcagagaaatctccagattgcaaaaatgcaaaagacagatgtgatgcttggggattatctggaatactggtttgaaaatattttcagtccgagaattgagacaaccacaagaatggttggagcatataccttatataatctgattcttccgagtatggaagcggatatcaaattaaaatacatttcagtagagtatttagatgctctactggaacgtgtcgcgaaaatttgtccttcagcaggaaataaagggcgagagcttttgagcatcgccatgaaagatgcagcaggagataagttcataagctataatccaatgcctgagacaaagccatattcgagagcaaaaccaaaggtaagggtattaggcaaagaaaaattgaaagtttttcttgaagctgccagcaagaatccttggtatctagaaattttactgggactgttttgtgggttacgaaaaggagaaattcttggattgaaatttcaggattttgattttgaaaaacagaccgtcagaattagcagacagcttgttggaaacctgaaactgaaagaaaaagaatttacggttacggaatatgctgttattgaaaggaatccaaagactgagaacagctaccggatattgagagtgccaaaagtggtgatgcaggaagtaaaacgcagacagcagttgattgaattgcgaaaaactgatccgggcatagaatacaagaattttgattatgtatgttgtcaggaaaatggcgaaccccgatcattaacggcaatgaatcaggcacttacgaaaatctgtaacagaaatggattggcaaatatcaccgtacatggactcagacatatgtttgcgaccattttaattgaacttggagttccattgtttaaaatatctggtctgttaggtcatagttccgttcatacgacttacgaatattattgtgagattatggacgagcaagataagattattgcgtttgtaaataatacatttgtaccacaacaaaccggaacggagggatagccatgcataagacctttgactttaagaaatatgtagaatataaggtctattcggtgacaacaatcaaaaagggatatggatttcgtgtgttgctgacgtttgcagacgaaagtacaaagacgcagcaacatgcgggattcacgaccaaaagagaagccaatgcatttcgtgatgaagtcattggacagctacataccggaacctatattgtgtatgggaaaatccgggtagaggagtttatgatcttctggctggaagatattatgcgtccccgaataacagacgacacatatacaacttacaaaagtgccattaggaattatattgttccacagcttggaaaaatgtatatgtctacactgaatcagggttatatcagaaaattatataatacagttgcagaaaagtacgaatcagttgcgaaaaatgtcaggacgatcatgaaaacatcattggagtatgcatttaacaaaaatgtattggcaactaatcctgcgaagggaatcaatttaccgaagaaaataaaaaagacagagtatcgtgttctgaaaatcgacgaaaagaaaacattgacacttccgcaggtgctacagttgattgaggcaagtaaagaaacaccgattcatatgcagattttatttgctgtattgatggggctcagaagaagtgaaatcaacggtttgaaatacagtgatgtcgattacattcacaggacgttgagagtagagcgtcagttggaaaagaagccaaacagtaaagcagaagactgtgcacctaagatgctgacaaagcaggaaattaaaacaaaaacacttgctggtgtgcgtgaacttccaataccggattatgtatttgaagcaattctggaagaacggaaaacttatgagaagaaccgcagacgcagaccaaaagagttccgggactggaattatatttgttgttctacatatgggaatccaaggagtaaaggctttcatcagaaatactataaagacttgttgaaatccttggatttgcctgatattcattttcaccagtgctccgtccggtgaatagatggtatctttggcatatacttcgaattcagcaccttctactccggtttcttcatatttaaagcctttataaatacatgtttcttctttaccagatacagcatttcttactttagagaccagtgcttttacttttgccagaacagaatctcctgttacttcggtaagctgttctccctttttcgtcaggagcaggcttcctacctgttcatcgtttttctgttctacctctacaatcgctgctcctgtatctggatcaatctgatgtgcaatgtttgaggatactgtaattacaataccgctctgtggattttctttatatgttccttttgtagtctgctctaatggtgaaataatcgttgttccatcatacagggactcttcgcttccctgtcttacaaatccttccggtgctttcacttcttcgattcgataggtagagcacttcagttcctgcggtgtgatcagatatccttcctcgtttgtttcgaatacactgatcttttctttcttcggatactgaacaacctgttccacatatttcttatttgtcacatcgtaaatcttataagaagcaccagcctttaaaaccgtatttccagtctgtgcatccttctttacaattttcaacaagaattcaaacggacggtcatcaaatactctccactgcattggttctctgctgtcattttccacatttacaacaaatggatcaatggttttcagattctccggggtagtgctttccactacaacataacttccatacggcagttccgggctgactacatatcctttggtatcagtgatcagttccggtactggtacggcggttccattctcataagtaactgcaacctgctctttgctgaagtcataattcttgaaatcacttgctgtatagctttctccattggacggtttcagtttcccatttttcacctgtgtcaggtcgctgatcagatataccttaaatcctgctcctgcaaccaggtctgtnnnnnnnnnntgaatacactgattttttctttcttcggatactgaacaacctgttccacatatttcttatttgttacatcgtaaatcttataagatgctccagcctttaaaacggtatttccagtctgtgcatccttctttacgattttcagcaaaaattcaaacgggcggtcatcaaatactctccactgcattggctctctgctgtcattttccacatttacaacaaatggatcaatggttttcagattctcaggggtagtgctttccactacaacataacttccatacggcagttccgggctgactgcatatccttttgtatcagtaattagttccggtactggtacggctgttccgttctcataagtaactgcaacctgctctttgctgaagtcataatttttgaaatcgtttgctgtatagctttctccattggcaggtttcagtttcccattttttacctgtgtcaggtcgctgatcagatataccttaaatcctgctcctgcaaccaggtctgtttctgtctgctctccatcttcactgactttgatcaactggaatgcctgtttctttacctgctcttttaccgtaaggtctcttgtcacttccgcaacatcctgaccttcataagttactgatacctcatattttgtagtatccagcgtatatccttccggtggagtgatttcttttacatacatttctccaaggtataattctgaaaattccagtgttccgtcatctccgatgactccctgtgcaatcaggctgtcctgtttatacagaactcctgttgtaccatccggatgcacgatgtcctcttttgcatacagaccatagactgcaccacgaagagtactgtcaccctgtgctttaaagagtggtaaaagtatccggtctgtctcaggagaaaataaagacacaggcatccatgcagaaacagcaggtggaaaaaagtcttcaggcgatgcagaaagcaagagtagtccagatggcaagaaaatcagcacaggcatcggcagaaagtggaaaatcagtctttcaggtaactggaaagggttcaaagttatccgtacagggaattacagcagcgattcaaaaagggggagtagctcttgaaaaaatgggaaaatggattgctgccggaggtggtgcatttcttctgattgtgggaatcattgcaggagcagctttcagcagtagttcggaaagctccgaatccctaagcgaagaagtgcttgcgtatacttctgtgatacagcagtatgcatcccaatacggcattccggaatatgtgtctgcgatacaggccatcatgatgcaggaatctggaggcaggggaacagacccgatgcagtgttcggaaagtccatataatacaagattctcacacagtcctggttctattaccgatccgaattattcgatagaggtgggggtacagacctttgcagactgtatcagtcaggcaggatgcagcagcccacaggatatggacaagttaaaacttgcatggcagggatataactatggaaattggataatagatcgttcttccttttgtcagtgtgactgttgaaccgctgcttgtggctctttcagccgcagacagtaccatgacattcccttcttcaatatcttctttgagttcttcgattgcctgtgcagatgcctcttccccggatgcctcgatctctacatcggtatagttctgcacaggcgagtccgaatcatcttcagattttgtatctgatttttgcttttctccaccattgtcctgtgcatgtgcctgaccttccgtatccgtcaggatcacctttcggctgatggtatagctgtcactctgctcctttggtacaaccatgtaagaggcaatgtaagttccggctttgtccggatggtattccccaccattttcatcttggatgctgataagcgtaacatcctctttttctgcatcataatggagtccttccatactggtttccactgcaaatgtttcatccgaaatctctttcgtaatatcgtctgccgtaactgcctgttctttctgacttgtaaccgcctgttcggatgcctgtacctcctgccccacatccgtctgctcggcagcgaacgcattggcactgcttaaggtactgacgcccatcaggacagccagtccaaaggctgcgattctggtttttaaattcttcaccttcatgtgtgtttcctttctgataataaatacattgttcagtaaaataccgcagaaggttctccctctgcggtaacatttatcttgtatattgcttttctgcttttttcatttcctgtctggtgcgttttactgcatccatcactgcctttgtcggcaaatcattttccagacatccttccagaattccatccagataaaatttcgatggtcttgccggaacatccttatgaggggagttcatcgtgtatacgaatacttcccttaaagctccagcctgatcctttacctgaatggtttctttcccataaaaatttggaaatccttcataaaaatccagcttcttttcacaagcttctgtgatcctccataaaactccatccacacagcttcctttttccggaagcacagttgcaacgccatttcccggagctctgccacgaaatgccagccggtaatcttccagccggacatttccaaccacttccgcatccggacagcggaatctcatctgccccaggttcatgttactgccatatgcaaaataatatctctcttctatttttctcacctcgatctgacgtcatccgtcctttgctttttcttcagacactcatacgtgcttttgtcatatctccatgccagatcaccttccagatttgccagcagatgtttccgcacatttttatattcttctccgattaatccgagccgcaacaaaaacgttcggaatgtaaacgccgggttttctgagatcggtgtctttttcatctgggtggatctctgattgatcgcctgtgcggaaatcgcaagtgccagtgtaatgtttgccctcacttttcctgcatgaagggtactttcaaaacagcgccactccaatgtccctttggaaaatacagcatggaggtttaacgcataataccgggtactgtcataatgattatgacttccatccctgcctccataccagacatttcttacccggtccatcgtaatggatttgtttggcatttttcggattttttccaatacctccggacgcaccttctgacaatagctgtactctcttctttcctgcactttcagtgctttgaacaggatatcttcctttgcgtacataatggtcagcgcatttttcagactctgcggtgtatggttcgccgcatctacatgaacatgctgaccacaggactcattgacaaaacctccatgtctccgcagacagcgtacaacttcctgtaatttccccatctcatcataggataatttcggtgataccatctctgttgaatattctctgcctgcgtctacagttcgaccgtatactttccgttgtgtataaatgctcccatcagacataaatttccacttttttccttccaaatctatcactgaccagattccgtaagttttgtgactgagcggcggacgggtgagtaacgcgtgggtaacctgcctcatacagggggataacagttagaaatgactgctaataccgcataagaccacggtaccgcatggtacagtggtaaaaactccggtggtatgagatggacccgcgtctgattaggtagttggtggggtaacggcctaccaagccgacgatcagtagccgacctgagagggtgaccggccacattgggactgagacacggcccagactcctacgggaggcagcagtggggaatattgcacaatggaggaaactctgatgcagcgacgccgcgtgaaggatgaagtatttcggtatgtaaacttctatcagcagggaagaaaatgacggtacctgactaagaagccccggctaactacgtgccagcagccgcggtaatacgtagggggcaagcgttatccggatttactgggtgtaaagggagcgtagacggcacggcaagccagatgtgaaagcccggggctcaaccccgggactgcatttggaactgctgagctagagtgtcggagaggcaagtggaattcctagtgtagcggtgaaatgcgtagatattaggaggaacaccagtggcgaaggcggcttgctggacgatgactgacgttgaggctcgaaagcgtggggagcaaacaggattagataccctggtagtccacgccgtaaacgatgactgctaggtgtcgggtggcaaagccattcggtgccgcagctaacgcaataagcagtccacctggggagtacgttcgcaagaatgaaactcaaaggaattgacggggacccgcacaagcggtggagcatgtggtttaattcgaagcaacgcgaagaaccttacctgatcttgacatcccgatgaccgcttcgtaatggaagtttttcttcggaacatcggtgacaggtggtgcatggttgtcgtcagctcgtgtcgtgagatgttgggttaagtcccgcaacgagcgcaacccctatcttcagtagccagcatttccatagttatatccctgccatgcaagttttaacttgtccatatcctgtgggctgctgcatcctgcctgactgatacaatctgcaaaggtctgcactcccacctctatcgaataattcgaatcggtaatagaaccaggactgtgtgagaattttgtattatacggactttccgaacactgcatcgggtctgttcctctgcctccagattcctgcatcatgatggcctgtatcgcagacacatattccggaataccgtattgggatgcgtactgctgtatcaccgaagtataagccagcacctcatcacttagagattcggagctttccgaactactattcctgagcttcggcagtgtgtttcagccccggacattttcggcgcaggacctctcgactagtgagctattacgcactctttgaatgtatggctgcttctaagccaacatcctagttgtctttgaaatcccacatccttttccacttaacacacattttggggccttagctgcaggtctgggctctttcccttttgactgtccaacttatctcgtacagtctgactcccatacaacatctacacggcattcggagtttgatattctttggtaagctttgacgccccctaggaaattcagtgctctacctccgcaagacttatatgaggctagccctaaagctatttcgaggagaaccagctatctccgggttcgattggaatttctcccctatccacacctcatccccacccttttcaacggatgtgggttcggtcctccattgccttttacggcaacttcaacctggacatggatagatcacccggtttcgggtctgctccgactgactcattcgccctattaagacttggtttcccttcggctccacacctttggtgcttaacctcgccagccagcgcaactcgccggaccgttctacaaaaagtacgcggttccacataaaacatggttccacagcttgtaaacatatggtttcaggttctgtttcactcccctcccggggtccttttcaccgttccttcacagtactatgcgctatcggtcactaaggagtatttagccttacggggtggtccccgcatgttcagtcaaggttccacgtgtctcgacctactctggataccgccatgtcaactcatctttcgcttacggggctttcaccctctctggccggctttcccaaaaccgttctgctaaatttgttgaatcaattatgcggtccgaaccccgggatgcacgcatcccggtttgggctcttccgttttcgctcgccgctactcacagaatcacatgttgttttctcttcctccggctacttagatgtttcagttcaccgggttcccctcctaacgttatgtattggcgttaggatacttgaggtttgctcaagtgggtttccccattcagagatctccggatcaaaggatatttgctcctccccgaagcttttcgcagcttatcacgtctttcatcggctcttagtgccaaggcatccaccatacgctctttctagcatgaccaacttgctttcataagggcacccgataaaatcgggtgtttatttacccttgatatgtgattggatctatgcttagtcgatatccatcggctggatccgatccccaaaatagatgcataactgatccagtgtcagaccccagtcccaagcctttccggtccatttttttgtgacatccatcattgccagatagagcatcttgaaaagggcatcatccgtcggaaaaatagtcttggattttgtaaccttgcgtagctggcggttaaaattttcgatggaatttgtagtatatattaatttacgtatctcagatggatatttaaaatatgtggataattgtgtccagttatttctccaggatccaatggaagcagggtactttttaccccatttttcttccagatcatccagggctgtgagtgcaagatcctctgtatctgctttgtaaaccagctttaaatctgccataaatggtcttagatctttgtaagaaataaactttgttgaataacggatctgatgtacaatacacctctggatctctgcctgcgggaatactgcatgaatcgcatccccgaatccggtcaatccatccacagatacgatcatgatatcctctacacctcggttttttatctcgttgaggacggacaaccagtattttgcactttcatttcctcctacccacatgccgaggacctcacgttttccgttcagtttaacacctatagcaacgtaaactgccttttttaccgttcgattgtcctcccgaacatggaaatgtaccgcatccataaaaacaatggcatattttctttccagcggccggttttgccattcttttgcgataggaaggattcgatctgtcatatgtgatatcatttctgcggatgcatccacaccgtaaacatctttgagatgagcggagatatctcttgtcgtcattccttttgcatacatagaaagtacctgatcttcaatgtttgagatatctgtctgattctttttcacaatctgcggttcaaaatctccctttcgatctcgtggtatatccagatcgatcgttcccattgaagaggtgacagttttaggactataaccattacggctatcgtctgtctctttgttcttgtagtcatacttggaatatccaaggtgatcatcacattatattttagtattctataaacctacgattttatcatcaatctgagaggtttacacagaataatttacactaccgttttcttcaaggatcgagaggccaactacgtcaataaattaaatcccaaacaaatttaatagcccaccacctgactaaatgcaaccacgccgaacagcataaacaacaccagataaattcccagtaatactgcgaatatgatcagctgtgctctgcagaagtttctccggttaatattaccgttactttcgaatgcccatacaaaatacatgactattccaacacacgggatcagtaatacgatcaatgtcagtatccagtcttttagatccattggagagttgtctgactgctcatttctgttccggctgtactgctggctgtaatcgtattgattgtcctgatatacgaatttattatcctgtgaatcctctgatccggttgcttccggttctggttccgccttctcttccggctctcctgccggttcttctgttgattcaccgtaactgtagacctcgtcagcggttacctgcttattttcttcatccatctgtcattctcctttgccttacttatttttgcatctatcttatcatttcagggctccgaacgcaacatccttgaacagtcgaagcagattatagtggtaataactcattggcggctggtccggaaaataccgatacatacgccacacgtagtaaatcaccataagaaccacacacacgacacagcctgtcttaaaccattttccaatcggcttcttacagatatagcgcttccatgcaaatatcaccacacctgctgcgaatgcatagataaacggatgcatcttccatgctcctttgaagtccagatgcaaaagccggattcctgctcttgtaagtccgcatgccggacaaggaaatcccgtgatccagacaaaagggcagatacccggcagaaattgacttccaaatacaaaataggcgattataaatataaccgcccattttgccttctttatatcattttttaataatacaaatccgtctttcaatatctttttcatcctgttatgagataactttcttcggacattttactgcacaggcaccacagtctttacatttctcgtagtcgatgtgcgcaatgttattttccactgtaacagcttcaaacttacatgctttctcacacatcttacatccgatacatccggctgtacatgcctgcataactgctttacctttgtcctgtgaattacattttaccagatgtttctgatcgtatggcacaatctcaatcaggtgttttggacatacagctacacattttccacatgctttacatgcttctttatctacaactgctacaccgttcacaatatgaattgcatcaaatggacatgcctgaacacagcttccgtctccaaggcatccataagaacaggctttcggtcctccgtcctgcatcatgttgaccatagtacagtcgctcagtccgtgatattcatattcctgttttgctttctcacagtctccgccacattttacaaatgcaacttcgtgtacctgtgcacctgcagcaacgcccatgatctctccgacttttgctgctaccggagcgcctccaaccggacatccgccgacttcagcttctccttttacgattgctgctgcaagtccggaacatccggcataaccacagccaccgcagttatttccaggaagaacgcccaagatggcttcttctctttcatctacctctaccgcaaatttcttaccggcaacgccgaggaatacaccaatgaataatccggtgcctcctacgataactgccgcaagaataatacctgtaacactcattgtctgcctcctcctaaattaatcctgagaatccacagaatgcgatcgccatcagacaagctgtgatcagtacgatcggagttccctggaaggactctgaaatatcattgtattccatcttctcacgaatacctgccatgatcacgatcgcgatcaggaatccgacagatgtaccaataccattgacaacaccttcgatgatagaatattctttctgaacgtttgtaagtgccacaccaagtaccgcacagtttgttgtgatcagtggaagatacacaccaagtgctttatacaatgatggcatactctttttcaggaacatttctacaaactgtactaaagctgcgataaacagaatgaatacgattgtctgcagatattcaaaccccagcggaaccaggatgaatttgtaaatcagtcctgtaaagaatgatgataatgtaataacgaatacaactgctccacccataccggttgcagtctcaacctttttcgaaacacccaggaacggacagattccaaggaactggctgagtacaacgttatttacgatagctgaaccaattgcaataatcaataattctttcatactatgtactcctcctactcttcattccctgttgggaatactttgcttccgcatccgccgcatgatgcacagtctgtaccgcatccctgtggctcggcaatcttcttgcctttctgtgctgcgcgtttcttaagcttgttcatacctgcaactaagaatgcaagaacaaggaaagctcctgcaggcaggatgaagattgttactggtacatatccgccttttcctgctgctgcgtctgcaagtggaagaatctgaacaccgaagatagctccggttccgataaactcacgaacgatcgcgatacaggtaagaccaaatgtaaatccaagtcccataccaataccatcgaagatagatggaagtaccgggttcttagatgcataactttctgcacgtccaaggatgatacagttaacaacgatcagtgggatgtaaagtccaagtgaatcatacagacttggaacgaatccctctaaaaggaactgtacaattgttacgaaagatgctacgactacgatgaatgccggcattctgactgaatccggaatcactttacgtaacatggaaatcaacatatttgacagtacaagtacgactgtagtagacagtcccatacccaaaccgttaattgcggatgttgttaccgccagggtcggacacattcctaacatcagaacgaaggtaggattttctttgatcagaccgttatatactctttcagtacatttattcatgatatactacctcctaatttacttaaatgcattctgataatatccgagtgctgtattgacagctcctgttacagctcttgaagtaatggttgcaccacttaaggcatcaatctgttctccgtcgccaccgtctttggaaactacgaatttatcagcttttttattcacatactgattataaaatgaaggctctgtagctttcataccaagtcctgctgtctcactgatagaaaggatagacacaccattgatggttccgtctttcttaataccaactgtgatctggatattgccgccgaatccgtctttatctgttgttgtgatgacatatccttcatcacctgctgtacagacttcatcaactgttgcatttgtacccatannnnnnnnnnnnnnnnnnnnnnnnnnnnnnnnnnnnnnnnnnnnnnnnnnnnnnnnnnnnnnnnnnnnnnnnnnnnnnnnnnnnnnnnnnnnnnnnnnnnnnnnnnnnnnnnnnnnnnnnnnnnnnnnnnnnnnnnnagcttcacatctgaaaataccgcctgccatgcttctttctttgtcttttcctgagactgggcaatcggatcttttgtgatctcatatacagctccgagtaagaatccggcaattacagtaatcaatgtaaggatcagtgtattcttaacaatcttattcattatttttctcctcctttaccgaatggttttggaagagtaactctttcgatcaatggcaccagaaggttactgatgatgatcgcataagaaactccttctgcggaaccgccaaacagacggaacagacctgttaacacgccaaggataataccgtatacatactgtcctttcggtgtgatcggagatgttacataatcggttgccatgaaccatgcaccaagcatcagtccgcctccgcagagatgtgctgtgatgtactgtggatcaaagaatccgacatccggatttgcaatatgtccgaagattccgataaagatcacaaatgtaacaatatatgttccaggaatacgaatatcgatcacacccatcaggatcaggaagatggctccgatcacgatagcgattacagatgtctcaccaatggttccaggaatcttaccaatcagcatatccattgtatttactgcgttaccagcttttaactgtgcaagtggtgtagctcctgtcacaccatcatatacaaagcttgtcatctggcttgtaaatgaaagcagaaggaaacatcttgctccgagggcagggttcatgaagttctgtcccagacctccgaataactgttttacgatcaggattgcgaacacactaccgatcgcacccatccaccatggtgctgtaggcggcatattcagaccaagtaacagacctgttacagctgcactccagtcgttgatcgtaatctttttatgcattaatttttcatatatgtactccgtcagtactgctacaactgttgttgtaaccagcattccgaatgccggcagtccaaagttccatacaccaaatgcagatgccggcaaaagtgcgatggccaccagcatcataatattactggtagtcgctttggaacgaatatgtggtgaagatgacattttcaaattgttctcactcacttttgttcacctcttcttctttctagtttattttttctttctacggttcgccaatgcaatctttctcatagatccgattgcctgtttcagcggacgttttgccggacatacgaaactgcaggaaccacattccatacattcgagtccttcgtgttttgtaaacttctcttcgtcatgatgttctgcataatccgccagtctcgatgggatcaggcggcttggacaggcttctacacagcgtccacagttgatacatgcagatggttccatcttagccacttcatctttggtaaatccaagaatagatgaagaagtctttgttacaggtacatctaatgagaacatagagaatcccatcatcggtccgccggagatcagtttctcaggctctgttttaaatcctcctgctgcctctacaagctcctgctgattgatgccaaatggtactctgaaattgcctggctctgcaacagcgtccccacttactgttacaacacgttccattgaaggctttccttctacaacagcctggtatacgcttaccattgttgccacattatctacaacacatcctgcgtctgccggaagcattgcggaattaattgcgcgccctgttgtagcgtaaataagctgacgctcaccaccctgaggatacttggtcttcagtgccagaacttccatacgaggttcatcttttgtcagttctcttaatttttcgatacagtctggtttgttgtcctctacaccaaagattcctttcgcgttgtcgaacagacggaggataatcttcattcctccaaccagcttttccggagtctcgatcattgttctgtagtcagctgtgatatatggctcacactccgcacagtttgcaatgatgtaatcaatcttttccggttcctttggtgaaagttttactctcgtagggaaaccggcaccacccatacctactactcccgctgttccaatcgcattcagaatatcttccttactcatgtcttctaacggagttacagctggatattccacttctttgtattcgccatcattttcgatcacgatactgttcactcttcctcctgtcggattcagatgtggtgcgattgcttttacagttccagatacagatgcataaatcggagcagatacgaatcctcctgcttctgctatcatctggccttttaaaacatgatcgccaacggctaccacaggatttgccggagcaccgatatgctgtgatacagggtacaccagattgcccttaggttttacgtcgacaattgccttatctttagccaggctcttgccgtcatccgggtgaataccacccttaaatgttaacaatgccatccttttttccttccttcctatttactctttatataatatacaggaaatatagacaaatttctatagaaagtgactaatttcattgtatattttcatgaacatcttgttgcatttttaacaaatgcacatacgcacaggaaacctgccaatggcaggtttccttctatcctcaggcatagaaaggatagaggctttcctctatcctttcctgtctgtatatctgatttgatattactcagcgtctgtctcttctgcagcttcttccggctgttctaaagctttcatgctcaggctgatcttcttctcagcttcattcagatcaacgatcttagctgtgatttcctgtccaactgaaagtacatcagacggtttatcaacatgtgctcttgaaatctgagaaacatgaagtaatgcatctactcctggagccagttcaacaaatgctccgaagtctgtcattcttgcaaccttacctgtaattactgttccgactgcataatcctctgctgcattagcccatggatttgtctctgggaatttcaggctgagtgcaatctttgtatcatggatatctttgatcatcacttctactttatctccaacctggaagaccttcttaggattctcaacacgtccccaagacatctcagagatatgaagaagtccgtctactccgccaaggtcgatgaatgctccgaaatctgtaacgttctttacagttccttccattctgtcacctacgttaatcttagcaaacagttctttctgtttttcagcacgttcagcaacaagaagctgtcttctgtcaccgatcacacgatttcttctaggattaaactcgctgattacgaattcaatttcctgtccctgatatttgctcaggtctttttcatatgtgtcagaaacaaggcttgcaggaatgaatactcttgcttcatcaactactacgcttaatccgccgccaagaatctgagttacaggagcttttaatacttcatgattctcgaatgcttcttttaatctttcattgcctttttctgctgcaagtctcttatatgtcagcagaacctgtccttctccgtcatttactttcaggacttttgcgctcatcttatcaccaacggatacaactgttgtaagatcaacgtttgcttcgttagtatactcatttcttgtaatgataccgtctgctttgtagcctatattcaagatgatttcatcaggtttaacgtcgatgactgtaccatctacaacctctccatttcttattgtcttaaaagactcttccaacatttgttcaaaagttaattctgacattattttgaacctcctcaattattttattgggcgtggatgcccctgctgtaatacctactgattccacggaccttaattgattaatatccaaatcgtcaagtgtctgtatatagtacgtattcaaacattcctctttgcagatttcaaatagcttttgagtattcgaactacgcttatcacctatcacaaccatagcatctactctcgctgcaatttgacgagcctcagtctgcctttctttcgtcgcattgcaaatcgtatttaaaacaactatatcatacctcttttttgaaataatttcaactaattctttgaatttattgtagttaaatgtcgtctgggccacgatacatactttctgttctttttcaggcaattcaaatctttctgcatcttccggagtctgtatcacagtcacctgttctcctgcccatccgcggataccttctacctccggatgttcgccatttccgatgatcacaatgtacgatcctttggcactttcttctgcaacaatcttatgaattttcttcacaaaaggacaagtcgcatctacacatgtaatcccgcgttcatccatgatatcataaatgtattttgctacaccatgagaccggatcacaaccacatccgcatccactgttttcaattcttcttcatcattcaggacttctactccatggcttctcagatctttgatcacttcttcattatggatgattggtccataagtgaatatcttttcactttgatgtttttctatctgtttatacactgtatctactgcacgctttactccaaagcaaaatcctgctgtttttgccagttcaacattcatatagtgtaattcctttctgtaccacagctctttttcaaatatattaccattatcttcgtctgccgctttgtgccggattgtctatttgcacaaatctacgattgcttttaccacttcttcgatcgtcatgtgtgagctgtctaccagcactgcatcctctgcctgctttaacggtgcgatctcacgggtcatatctctgtgatcacgttcttcgatgtcgtgtgcgatttcttccagattgcagtcctcgccttttcccttaagttcgtcataccgtctcttcgccctggtctctacactggcggtcagatagatctttacgtctgcgcccggcaggacacatgtaccgatatctcttccgtccataattacatcctgtgtcttcgccaggttctgctgcagttccagtaacttcttacgcacttccggaattgcagatgttacagatgccatgttccccacttcttcatttctcagacgtgatgaaatatcattaccattcaggtatacatgctgcacaccatcttcataggcgattgttacttctgcatctttacatgcttcgatcactttatccgtctctcccggttcaatgcccttattcaggaaatgaattgcaaggcctctgtacattgcccctgtgtctacataaatgtatcccttttcttttgctacaagttttgcgatcgtgctttttccggctcctgccggtccatctattgctacgttatatcccatgatgcgttctccttatttctatttttatcactctatatctggatccccgttccggccgcatatgccgtagaccacgcgatctgaaggttgaatccacctgttaccgcatccagatccagtacctctcctgcaaaatgtaatcccttcaccagtttggattccatcgttccaggatcaacttctttgattttaattccacctttagttatgattgcctcgttataatctcttaaatctgtcaatgtacacgtcaggcccttgatcagtcttacaaatccaagacgttcttctttcgtgatcacattgaccttcttctcgggatcaatcccgctcagttcaatcataaccgggatcagtttcgacgggaacagcttgtgcaccgcgttcttaaactgtcggttctgattctcttcaaattcccggagcactctgtgatcaagctgttcttccgaaagagctggtttcagatcaatcttaagtgtcagttcttttgccttcaatttctttcccacataactgctggcacttaggatcagcggtccactcacaccgtaatgcgtgaataacatttctccaaaatcatcatacagctttttcttgccgtcaagaatcgttacattaacatttcgaagtgaaagtccctgcaattcaggcacccactcctctttacattccatcggcacaagcgcaggcatacaatccgtcaccgtatgtccgagactttctgcaaaccggaatccatctccggttgatcctgttgactgataagacaaccctccagttgcaacgatacaggcatccgcatgaatctgtctctgatctccaagtatgattttttcaaaatgtccgtcttttgcgacaacctttttcacagctgtccgcagatgtactttcacacccaggcggtccatctcccgctccagcccgcggatcacgtccgaagaatgatccgacaccgggaacacacggtcgccgcgctcaatctttgtcggcacaccgattcgttcaaagaaatcaatcacctgctgattcgtgtatccataaaaactactgtataaaaactttgcatttgttctgaccgcatcgaacaggccttccatatcacaggcattggtaatattgcatctgccttttcccgtgatataaagtttctttccaagcttttcattcttttcatataccacgacctgatgtccacacccggccgctgcaatagaggcaaacattcctgccgcaccgcctccgatgacaaccactttactcatcttctatttgtccttttctatttgtctttttcttcatattcttttctgccggttctactctttctcatttccggaaagttcgactctgtcgtccaccatattcaattcatctttgctatacacctgatattcatcccagatctgctccaatgtctcaagtgttgtgataacctctttctgtttcttcatacaaagagctaccaccagcgcattgatcacactcaatggtgctaccagcgaatctacgattgacgccatatcacttcttgcgatcagattgcaggaagaatacagtgtcatcggagaatgtacactgtccgtcaacgtgatcactgttgcttttctattacttgcaaattccagtgctttcaaagtacgcatcgaatatctgggaaagctgatcccgatcaccacatcatcctcgctgacacggatcagttgttcaaaaatctcactagaactgttcgtattaactgctgtcacattctcacagatcagattcagataaaaacttaagaaacttgcaagcggcgaacagcttcgtatcccgatcacatagatcctctttgctttcaggatcgtatctaccgccatctcaaatgcttcatgatcaattgcttccatcgtaagcttgatcttctcaatatccgaatgcagaaccgatgtcagaatctccccctggctgatccgtccatacgtcacttccatacgctggatggaattcagcttcatcctcaccagttctcccagagctttctgaaattccgggtatccgtcatatccaagggccgttgcaaatcttaccaccgtcgattcactgacaccgacctctccccccatcttcgcagctgtcaaaaaagctgccttatcataatcctcacggataaaatccgccagttttttctgtcctttgctgaatttgtgatatctttcatcgatcatcttcagcagttcattctttgcgctcatgcgatgtacctctttttcaaacaatatttttattatatagctttgtgggggaatagtcaattggtgttggattgtcggagggtggtggttacgggataggtgtggctcccggcacacacctcccactatccctgcatttttcgtgaacagccaagtgtagaagtgcctggttcaatgcatacgcagggcgctttgcaaggccgttggtagaaaatgagaccgtaaaataagattcgggatgtgccacaagcacatcccgaaagagaatacccgaggcgagaaatcatcaagatttctcgtccgaatgtattcggttcttattttacagtctcattttatgcctacggattgcaagccccgaagtcgcattgagccaggcacttctacacttggcgtccgctaaaacctatacaggataactaccattctccgtatccgctaccgtcgcatccaccttcgtctgctgtgcctctctatacttaaagaactcaacagcaacctgtgggaacagagcataagacagtacatcttcatcctgctggatccactgttcgcattctttgcggagtgtatctaattcgtccggaatcaggtctgcaggacggcatgtgatgatctcaggatcgtctccaagtactttcttgattacgtctggattcatcggttttactgtctgtccgtattttccacttaagaggtcttttgtctcttttgtagcaactttgtaacgttctcccatcagtacgttaaatacagcctgtgtaccaacgatctgtgatgaaggtgttacaagtggtggttctccaaggtctttacgtactcttggcacttcctcaagtacatcgtagaacttgtcttcagcaccctgctcttttaactgtgatgtcaggttagaaagcattccgcctggtacctgatacagaagagtcttgatgttaacaccaaggttctttggatttaagagtccgctgtcaagagcttcgtcacggattggacggaaatagtcagcgatctctgccagaagtttctggtctaatcctgtatcataaggtgttcccttgaatgtctcaaccataacttctgttgcaggctgagatgttccaagtgcgaatggtgagattgcggtatcaatgacatctacaccggcctctactgctttcatgtaagtcatagaagcaacacctgatgtgtagtgtgtatgaagctggatcggaagatctacagcttctttcattgctccgatcagctctgttgccttatacggtgtcagaagaccagccatatctttgatacagatagagtttgcacccatctcttcaatcttcttggcaatgtctacccagtaatctagtgtataagcatcacctaaagtgtaagataatgcgatctgagcttctactttttctttgtttgcagccttaaccgctgtcttcaggttacgaagatcatttaagcagtcaaagatacggatgatgtcgattccgttggcagcagatttctgtacgaaatattctaccacatcatctgcgtatggacgatatcctaagatgttctgtccacggaataacatctgaagttttgtatttttgaatccatcacggaatttacgaagtctttcccatggatcttcttttaagaaacgaagagatgcatcgaatgtagctccaccccagcactctacggaatgatacccaaccttgtccattttatcaacgatcgggagcatctgctctgttgtcatacgggttgcgatcagagactgatgcgcatcacgcaggatcgtttctgtaatctctacaggtttttttactatatctgccattttctttcctcctaattatatatcgcttaaattcctacgccaaagattgccataaatgttccggcagctacggctgtaccgataacacccgcaacgtttggtcccatagcatgcatcagaaggaagtttgtcgggtctgcctcagctccgaccttctgtgatactctggctgccattggaactgcagatacaccggcagaaccaatcagtggattaaccttaccatgtgttgcaacacacatcagtttaccgaacagtacacctgcggctgtaccaaatgcgaatgcgatcagaccgagaactacgatcttaattgtatccatattaaggaatgcctcagcacttgttgttgctcctacggatgttccaagcaggataactacgatgtacatcattgcattggaagctgtctctgttaactgtcttacaactccagactcacggaacaggttaccaagcattaacataccaaccagtggtgctgttgtaggaagaattacacacacaacgatcgtaacgatgattgggaataagatcttctcaagcctggaaacaggtcttaactgttccatcttaatcttacgttctttttctgttgtcagaagcttcatgattggtggctggataatcggtaccagtgacatataagaatatgctgctactgcgattggtccaagtaaagctgtctgctgtaacttacctgcaaggaagatagaggtaggtccatcagctccaccaatgattgagatcgctgctgccgctttgtcagagaatcccatagccatcgctccaaggtatgctgcaaagataccaaactgagcagaggcaccaagaaggaagctcttagggttagcgatcagtggtccgaagtctgtcatcgctcctacacccatgaagatcagggaagggaggattgaccactcatccagtttatagaagtagtaaagcagtccgcctgttccatttgccgcatcttctgcatgaagcatgatgtccggataaatgttaaccagtaacataccaaatgcgattggaacaagaagcagaggctcgaatccgtgtctgattgcaagataaaggaaaacacatgcaaccgcgatcatgactacattgccccatgtaagactgaaaaacgccgtctgatgcacgaggtttcctaatgttgtcgttatatattccattttttaacctccagtcgtgttagataaacaccatataaatgatgttagttcaatgtagcaagaacagcgcctgaatcaattgcatcgcctactgctacatcaatgcttgcaacggttccgtcttccggtgctacaactgggatttccatcttcatagcctcgatgatgacaactgcatcacccttctttacagcctgacctacatttgcttcgatcttgaatacctttcctgctgctccggcttttacttcgatggatccggctccgcctgcaggtgctgcctttggtgctggtgttgccgcaggcgctgccttcggtgctgctgcaggtcttgctactggtgctgcacctgctccgttttcttctactgttacatcatatacattgccattcactgtgattgtataatttttcattgaattcatcctcctaattaattatgcgtgccacttatttgatggacgacgcttgatgcttcttactacgaagccgtctgtgcttccaccggcttctgcttcataagcagcgatcgctgcggaaataactgctgccagttcatcatcattcgatgcttcttctactacaggtgctgcaactgctgccggagccggagctgcttcctgtgtgctttctgcttttcctttgttcttgaatttttcttcaagtgcaggaatgtatttgaacagggagatcagaattgagataaagatcaggattacgaatacggtacccattccaaggattgtattcagtcctgctttttccatgatctcaccgatgctgtaatgtgcatcgatcgttgtactgtccagataaaggtcctcatcaaaaacaaatgtaatgtctgcatcacggtctttgaattttgcactggtcgttactttcagttcatcagaggatggttcgaatttgtaatcaccgtggcttacatattccccacactcttttgttccctgctgccatgcatccagagctgcaaggaaactatcttttgtaaatggaacacccgcctggttcagctgggactcgatctgaaaatctgtcatcttgttccactgttcgatagtatctgcatctgcactgttgcaatactcgatcagaaaatctgttgcctgtgtgatcgttgatttatcatactgaagattttctttcttacttccgcaagcggtaaagcagagcattgcgacaagcacacaaagtaatacgcttaattttttcttcactttgcctcacctctctaaaccgtaccgtgtttctttaccggacgatcctctctttttgtgaataacatctcgaatgcgccgatcacatattttcttgtatctgctgcttcgatgattgtatccacatatcctcttttcgctgctgataatgggcttgactgcagattcttatattctgctgctttttctctgattgttgctgcatcagcgtctgcatacatgatcttggctgcctggtttgcgtccatcattccaatctctgcttccggccatgcatataccatatctgctccgactgctttgctgttcattgtcacatacgcacttccgaatgctttaccgattacaacatttaccttcggtactgttgcatctgcaaatgcataagtaagttttgctgctgattttgcaatacgtttctcatcgtattcgcttgctgtaaatccgcttacatttgtaagtgtcagtacagggatgttgaatgcatcacagaactgtacgaattctgcagccttttcagctccgtcagcagaaagtgagccgtcaaattcagcctccacttcagcttcttcgttatatacttttgaacggtttgcaactgcacctacagtcataccattcagtttgatgaatcctgccaccatatcttttgcatatgctttcttcacttcgcagaagatgttgtcatcagagatcattgtaagagcgatcgctgtgtcttcttttgcattagcaaggtctgcacatacacggttcagatcatcgttacattcttcataagaagaatcctcttcgttgttgctcggtaacatgcatacgagagaacggatatctgcaagaatctcttcttcagatccgattccgtctacaagaccggttgtctcactctggaattttgcggaagatgtatcacatttagaaatgtcatttcccggaattgcatttggagtattggtaaataatttaccattctttgtctccatgaatgtgaaatctgtcagagcaggtacgatagaaagtccacctccacatgttccgaagattgctgtgatctgagggatcactccggaagccattgactgtttctgataaagttttccaaatgcctctaaagcatctgtagcttcctgcagtctgaatccggcgcagtcaaccaatccgatgaccggtgctcccatcttcattgccatatcgtagatattagaaatcttctttgcatgcatctcaccgatcgcaccatttaaaacagtagcgtcctggctgtatacgtataccagatttccatcgatcactccatatccggtgataacaccgtctgctggagtttctttttcctgcatgttaaaatcagttgttcttgctgttacagctccaccgatctcaacaaaactgcccgcatcaagtaaactgttgattctcttacctgctgcattgtctgctgccatgttgcccatagtctagccctccattttcattattttaaattgggtttttcctgattcttgtatcaaaagtaaaaccaaattttttccaattatattatactgtttttgacactttagcgcaatacctttatattgttttttgttaaatacttgacgagtcgtataaatcctgtatataaaaaagccatgtgtccccgtacttcttccgtacgcacatagccttttcatctgcagcattctgttctaaaacttcttcactttttttctcttcatattcctgcatctttccagaagaaattctgccagttcgtccgtattgtttccttccagtgcagtctttggaaatccgatcatcgctcttgccgatccgaccgtctcgggatctgccttcacaactacaccgaatgcctctttcgtctccaggatcttggtaacatctttgtacgaaaatgatcttgtctttttcgcagttacactgtcaaagtgatcatcaaaaaagtggatttcggaactcaccggtccaccgttcaatctgcatcgtctgtcaaactgctcttctgcatccccgaccgccgttgtcgataacacctttctccagattgttctgttcagtatcactgccgcaacaaatgccagtgcccagactacaatatacttaatgacaaaaaaagtcattcctcccggcgtaccgcctcccgggtttccatatttgcacataaaatagaacacaagcggtcccatcaccgtcactataaacttaatcgtaatatcactgctgtccacacggaaaagttcacagatctgtttcagcgtgttctttgactccttataagccacacggtaataatttgccatatcattttcccctttacaaaatctgtgtcttattatatccttatatagttgattattcaagaatatcctttatattatttgtaaataatctataaactcttctatgtattctatctatgtagtttctccataagcgatcctgtttatttttgatttctattatcatttagtgattttggcttacattttccggctatatatggtcgttttattacatttcaacatacatattcctaacaaagcataaaaaaccttaactttttcttaaacaattagttgtactttaatctagtttgtgataagattaactgcgttgagagttttaatcataaggggggttcctcgtattattaaaaccaaagaaaaatttcatattggagggtgaatctcatggagaacactaagaaaaaatttccatttggtttctatgtgtgctgtctgactttctcttttgaaagacttgcatactacgctgctaaatgggggcttgcgattttcatcgcagccaaagcagtaaacggtggtcttggacttgatcaatccgtaggtgctgcaatgagttctaaccttgtagcgttcacttatatcacacctatcatcggtggatatatcgctgaccgctggattagtcctcgtatcctcgtaccaattggagagatcatgatgggtcttggatatctgtgtgcctggaaagcaaacggagtcggaatgttatgggcaatgatcattctcgtttctatcggaactggtttcttcaaaggaaacgtatctggtatcaacggacgtctcttcccattagctgatcaggacgaactcgacactgtattcaacttacagtacatgttcgttaacatcggttctttctgcggaactactttcctttcacttgttggaaagagcgctggataccgtactatgttcctggtttgtgcaatcttcctgttcatcgactgcgtatggtggttcgttggaatgaagtccttcggcgaagccggaaagaaaccattccttgttgacaaccgtacagaaaatgttgacaaagccgacaaagagaaagacaatgcacctcttaccaaacttgagaaaaaccgtgtgattgctatctgcatcgtaacactcttctctggtattttctggctgatctggtacatggcttacatgcctgtttactatgaattcggtccagtatcagaagcaggacgtggatgggctaactggaacattggttccttcgagatgcctactgcatggtttgactcaatgaacggacttctttgtatcatcctttgtcctgtattcgcaggaatctgggctaagatgagacagcgtccacagggtgactggggaatgttcacaaagacagctatcggtattatcatacttggtctttgtacagcttccatggtacttgcagcagttctttgcggacagagtgcagataaaccagttggtatctgggtaatcatcctggcttctgtatgtatgtcagtcggagaagttatcttctcaccacttggaaactcattcatcagcaaatatgctccaaagaaacttcttggaactatgcttggtgtatggccactggtcatcttcttcgctggtaaagcttatggaccactttataactggctcgaaaacttcgacttcattaaagcatatggtgttattacaatcatcatcgttgcctgcggagttatcatgttagcatttactaagaagttcgacaagatggttgaaggtaaataattcgtgaattaaataccgtacataaaaataagacttgcataagcaagtcttatttttatggggacgggttttccggcttttttgttgtcccctccggctcaatctatcatattcttttattttttacgatactttttattccctgtactgtaacttcttttaatctgattattatttttcttcgtcttcttcgtgctttctttcttatttgccttcacactgaatgaatctccggatccacgtggtgtaatattcttctttgttccgatttctttctggtcttcgaacgcaggcttcagaagtaattccgcaccaattacaaagcaggcaacttctattgccagctggatcatctccccgttctttccgagtccttcaaagaaaggatctagaactcttgccccagaaaggatcaccagtgtcagtccggcataagtaaacaacgaatagaacatcatcgtcttccccctgccttcattctgctgcatgaagtagtatcctgcgataaaaatcacaccgccaaggatcatcaatatgtactttaacatttctatctcttcctcccaatcatgttttctgtaaagtctattatttattatacatgaaatccatctcgattcctatctttttatatgtatatttttatttttccgtttacgcacttttaaaagggatgcaccttccggcacatccctcgcaacttttcactacttattttatttctgatttctaaactgcatcggagtcatatcataagctttcttgaacagtctgttgaaatgctcaacattctgatatccgactgacattgcaatgttctcgactgtcatattactgcttttgagcagtgctttcgctttcttcatgcggattttcttcaccagatccccaaatgtcattccggatttttccttaatgtattttgacagataaggtttggacaggaagaatttttctgccaggtcatctaatgtaatgtcaatataatttgcctgtacataattcatgatctcgatcattcttgcatccgtacatgcatcagcactcccgagttcttcaatcttatttaccgcaacgatcaaggcttcaatggaagctctgataatatccggatcgattcctacaccccagaatgtctttccgttgcatataattcccacataagcaacagccttagaagaagatccctttgtaagcgaatgttcttcgtagaaggataattcatagctgatattgaaatactgcttaattgcattacttactgcgtccagacgtccatttccgttcgaagtgatcactttactctctcctgcatgattgatcgtcacttctgcggtaattccgtctacctgtttaaaatggcactcatcaatatggaagatggatttggtattaatatagtgatcagagaagatctggtatacccagtctggtgtcagctctttgtgtgctttatccgatacatcttttaccatatatcctacttcttcacgcattgcctttggaagattgattccgtggctgtgcattaagatgtagtttacgccgcccttaccagactgactgttgatacggataacgtccgaatcatactctcttccgacatcttttggatcgatcggcagatacggaactgtccatttatcacatttcttctcatctctccatgccatacccttggcaatcgcatcctgatgtgatccggaaaatgcagtaaataccaggtctccggaatatggctgacggtcatatacctgcattctggtcagacgctcatatgtctcgcggatctttctcatattagagaaatccagtcccggatctacaccctgggaatacatattcattccaagtgtgatgatatcaacgttaccggtacgttctccgtttccaaacaatgtaccctcgatacgatcagctcctgcaagaatacccagttctgcagttgccactccgcatcctctgtcattatgtggatgaagtgaaagtaccacattctctctgtgtttcaaatgcttatgtacatactctaactggcatgcaaatgtatgaggcattgcattttctacagttgtaggaatattgatgattgctttattatcagctgtcggctgccatacatccagaacagcgttacaaacttctacggcatagtccacttctgttccgtggaaactttccggactgtattcaaatgtgaagttaccatctgtctcattagccagcttcagaagtaattttgccccgtcgatcgcaagttgctttacctgttctttatcttttctgaacacctgctctctctgtgcaacagaggtagaattgtataaatggatcactgcgtgaggtgctccttttacagcttcaaatgttctcttgatgatgtgttctcttgcctgtgtcaggacctgaacggttacatcatccggaatcatatctttctcaatcaaagttctcatgaactgatactctgtctcggaagcagccgggaatccaacctcaatctccttaaatccgatatcaaccagcatctggaagaactccagcttttcatccagactcattggttcgatcaatgcctggttaccatctcttaaatctacactacaccatttcggcggctgttctaccgaatctttttttgcccagtcatatgtgacctcaggcggcatgaaataacttttctcatatttctgataattcttcataattaaaagcctctccttttacccaatatttcaaatcttatcatcttgcaataataatcatcaattttgttgttcatttttaatacttttatatcctaacacatccctacgcaaaagggaagtgataaatttaatcacttcccttgatgttttttaatatgttcgatttttcagattatttcgattaattctgttccagagaacgtttcttggtgattgtaaccttctcatcatagcaggcaaatatctcatccaccctgtctttcttaagttttggtgtaagtacactcactaccggcactacgatcagtcctgctaccatcgcaattgctcctgcattaatcggagatgcaataaagtggaagaagaggttcaaaaccgtaattccgacacctgccgtaaaacttgcccagaccgcggctcttgtcacacctttccagtacaatccatacatgaacggtgcaaggaatgctccggccagtgcaccccaggaaattcccataagctgtgcaatgaatgtaggtggatccattgcaatcactactgataatacaatgaagaatactaccatcacctgcatggttcgtacctgtttcttctcactcatatctttcatcacattgtcttttaagaaatccaaagtcaatgtcgagctggatgtcaataccagcgaagccagggttgacatggaagccgataataccagcactactacgataccgatcaggatatccggaagtgttgataacatatgtggaatgattccgtcgaagatcatattgcccgcctcatcatgtaattccggtgcatcaaacaatcttccgaatcctcctaggaagtaacatcctccggagatcacgatcgcaaacaacgtagagatcacagttcctgtattaattgatttttcatctttaatcgcatagaacttaccaaccatctgtggaagtccccatgttccaagagaagttaagataacaacccccagaagatttaacggatccggcccaaagaatgaagtaaacgcgcccggctgtcccattgtcaccggcacatcacttgggatctctgccattgtcttaattgcctgaataaatccgccctgaccatttaataccgccaggataactgccacgataccacccagcatgataatcccctgaatgaagtcattgatcgccgtagccatgtatccgccaagaataacataaattcccgtaaacactgccattccgatcacacaatatttataaggaatattaaatgccattccgaataaccttgacaatccgttatatacagaagccgtatacggaaccaggaatataaatacgattgcagaagctgtaatcttaagcgccttgctttcgtatctctcaccaaagaaatccggcatcgtcttagaattcaaatgctgtgtcataaccttggtacgtcttccgagtacaacccatgccagcaaacttccgataatcgcattcccaagaccgatccatgtagatgcgagaccatatttccatccaaactgtcctgcatatcctacgaatacaactgcggagaaatatgacgttccatacgcaaatgccgtaagccaggggcctaccgatcttcctcccaatacataaccgtctacacttgtcgcatgctttcttgcatagatgccgaccgataccataatcgcaaaaaatatcaccagcatcaataatttcgtcgccataacttttctcctctactttcctcatttctttttacttgttttcgctaattcactttaaagcgttgcgctttaaagtgctaaagtttacggtgttagaataacacagatgatacggtatgtcaatcttattttgcagaaatataaaagaaatatataaaaggcaaaaaaacagctgcgattcctttttttgcggaatgcacagctgctctttagcttctatttcatcttctccactctgtcctgaatggtcttgttaaagttctctacctttctttcatatgtagaattcataaattcagacttcagcatgaaatctgctgttgcaagattgttagctgtaggaatatcgtaaagtacggcaatacgggataatgctcttacatccggatcgtgcggctgtgcctctaacggatcccacaggaagatcataaagtcgatctgtccttctacaatcttcgctccgacctgctgatctcctccgagcgggccgctgttatatccctttaccggaagcccggtcttctctgcgatcagacgtgcggttgtacctgtaccgcataagaaatgaccttttaagatttccttattcttgtcgcaccattcgatcagttcttttttcttaccatcatgggcaacgagtgcgatatgctttgcttttccaatttcaaatgttacaaaattatcgtttaacatctgttgaattctccttccgttttaactctcttcgttatctttatatatcaaacttatatttataataaaatgtattttattatctgtcaactttaaactggaaattaaattgtattttagttacaacaatttgcccatcactttcagaacgtctcaacgatttcctgcatctgatcaaactgttcttccatctcttttacaagcctgaactgtgttcttgcccgaacaagattgtgttctggataagttgttttgaaatatacatcgccctggaggaagtcagcaagaaaacgcataccgcattccagcgtcataagtctcgctccccacggaagactggcgttctccgccggtgtcagtacatccttcgccatctccagataccctttcacgtagatgcggtaaagctctatatcaaagtgcaccttgttcagatccttctcatcttcttccgctgtcgatgccccgaaccggatggaatcaccaaagtcatttgccgcaagtcccggcatgatcgtgtccagatcgatgatgcacagtccctctcctgtattcttatcaaacaaaatgttattcagcttggtatcgttgtgcgtcacacggagcggaagtattccttcctcaagctgcttcataaggacaccgcagtcatcctcgcgtgccaatacaaactctatttcttcacggcaaagtcttgccctgttcttcacatctttccgcagtgcgtctttgaaatcatggaaacgcttcaccgtatcgtggaacttcggaatcgtctcatagagactctcggccggataatcccccagctgcttcagaaaatggccaaagctgagtgccgactgatagaactgttccggtctctccaccatctgatagcacacagaatccggtacataatgcaggcagcgccatggctgtccatccgcatcttcaaaatagctctctcctgattttgtcttaatataagacaatgcctctctgtctagatctccgcctgcctcacggatcatactgcgcagatactccgtaacgccgaatatattcgccattacctgatccgggttcttgaatacattaatattgatgcgctgcaaaacatagagcggcgtatcctttccatctgcgcccggcatatagactgcataagtctcattgatgtgtccttctccgaatggcttcacataactgcactgctgcccgaaaccaaatgcgtacacggcatcttccagactccggctgtccacgccctcgatcttccttctggttgagaagatcacttctcctgcctccactttacatccgctctcgatcgtacagtctgactttacaacactccccagtccgacatgcgctccggcacatactactgaattgtgatctacgattgccccgctgttcaccagcaccgcacgtccgatccgggtattggtatttaccaccgctctctgcatcacaaagcagcccggttccagcaccgcactcggacttacaactgcagacggatgcacgattgccggtacctcataccctttttccagcaatttatccgtccagtacagacgcatcttgttatttccaaatgctgctactgccaccggatactccttatgtctgatctcataatcacaacacattccgatgaccgcttcatccttcaccgcatcatccaaaaatacaaccttttcataccccagtgcctgcgcagtctccgctaccatccggccaaatccgcctgcaccgagaatcagcaaacttttcattacgtatttcccccaattgtttttttattgatcagttatactatatcatatcatagaagtggacccggagatagttattttcacaaaaagcttcggagaatcacaggtagcaggattctccgaagcttctttgtatttatatttatattggaaaggggttcccttttagggacatattttaaagatagttcaatctttcaagggtattcaataccatatggcgtccggcatccgttccgtcaatgatacgtctcgcacgtacagaagccctgtgccgccacgtgcacgcagctcataatatttgatatgttcgtcgctcagtttcccatcatgtccggcgaaatcacttcccataggcatcattacaacacggtttttgagtgtcatacctctgatcgtaagagggctgaatacgtgtggaaaattgtttttcatagtttactaacctccataaaaatataattgtatttgtttgcatttctctataatttgattattttgttaaataaaagacaaattagtatttttatgaaagttgatagattttgtctatgaattttaatcataaaaaatggccgctgcgccagcagattattcactaccggtacagcggccatttttcttaacttttttattttttctgatttttttcaggtattaatttcccggcgatcaaacacaggatgatcgtgatcaccatatccggcaatgtatttcctaccggcatatctacattcataagaattctgtacacaacgaatccaatcacccagatgatcatgttcggcatatgcactgcctggctgcttttatcttgttttaacaggaaaaagtcagcaatctgaatagcgatcatcggtgcaaatacagaaccgatcagatacaggaaatctgttatattatccatcggatatacaattgcagcggccgttccaatcactgtcacaacgatagcaacatgctttccgttccatctgcttacaaccgtctcactggagattccagcagagtatgcatccaggaaagtggttgtaactgttgaaaatacaatgatcagaagtcccaggatgccaagacctgcctttaacatgatctgtgcaatgtcatattctccggtaatgatagcagctcccattccgatcacatacatccagcagcttacaattccatatgtaaccgcactgactgcagttgctttcacaggttccttcgcctctcttgtgtaatcactgatcagtggcagccacgataatggcatcgcaaccgcaagctctactgctgctccaaatgtcatactgtcgtcagacggtgttcccgccccgcttcctgtaaatatcaccttacacagaatcagtgtcaggataaataatgctgccatcgcaacggtattgatcttgcccagattcgtaattccgatcacaatccacagaatgatcaatgctccgatcaccaggcaccatatccatctgccggtatgcatcacaccgtctgctgccagtgccccgtcatagatcatgatcgcagtccagccgacaagctgcaatacattcaggaccgcaaaaaggatacttcctttctgtccaaagctcatctttacagtctccattgcactctttctgacttttccgccgatcactcctgccaggaacagcatcagacaaccaatgatgtgtcctactatgattgccgccagtccttttcccatgccaagcggggccagatatgttccggtcaggatctctgcgatcgaaacccctgcgccgaaccagatcagaccgttttcaaataagccggtacgcttctcttccataatgtttattcctcctcgtcttcctttgtagtcttatataatagtctttttcaaagcctgttccagcatctgcatctcatcatcacttagtttccactcaaataccttacagttctcctcaattttatcacggctctgcgctcctataatacaagaagaaataaaaggtctctgcaaggtccagttcaatgcaatctgcgacaatggaacatttcgttccacactgatctgatccattgttcttaaaagaagcattacttttgaaaacaacggttctttaaaatatgggtaaaaccggtttcggttatcatccacaccatattccttgagttctctgtattttccggttaaaatgcctcctccgaatgttccataagtcataactcccatttcctgagcacaggcccaccggatcagctgctcccatttccgatctaccatagaatactgtggctgatatgcttctatagcacaatatttttctgcttcttccatctgttcttttgtaaaattcgatactccgatatgcagaatctttccttgctttttcaatgtattaatcgcatccattgtctcttccatcggaacattcggatccggccagtggaccagatatacatcgatataatctgtcttcagattacggagtgattcttcgcattcccgcatgatcttatctgccgacccgcagcgtacatattttccattaataaattcatttccacacttggtagccaggatcacttctttcctgacgccaagtttgtgcacaacttctccgatatactgttctgccctgcctccgttgtaggcgggtgccgtatcaataaaattgattccacaatctactgctgccttgatcgcatccatccggctttcgtcggaataagaatcccatccggcacctccgattccccatgtaccaagacacatcctggatacacgaagctgtgtctttccaaattctgtatattccattttcttcatctccgtttcatttttcgctcattttgtcaatctatcatttttatatttagaataatgatatcagaaaaatttttatgactcaagagctgaatgctttcttccaagcttgcccgttcccgtctccaacgactgtcaataccgcagcggaatctccgactttttcacacgcacttccagatttctgcttccaaaataatgccgcaatcccttaaccgccagatcacttatattcttcgtcccaacgcaaacaaattttaaacaacttatatctccaagcttcattcttataaacggaataaatacttcatcttttatccgatattccaccggaatgctattttccggcacttgatgctctcttttatgtacacagaggaacaccatgcgatattcctgttcctgtgcaaaacattcctttttgaagaacatattatacaacaggcagatcactgagatatgatctacaaataatttgacatcctcttcttctgcgctatccagatcatcccagccatgaatggttttataatcttctccatccgataacagccgccgttctatggtaacatgttttatacgtccatctcttcttcgtagtacttgatcagtgcctgagtgccgagatctccgcagccttctgcctgaaggagttcgtagttggcaagcacctggcttaatacgtccagattgagattgctcatgttcgcttcggtaagggcgatcttcatgtctttgacgaagtgcttcaggaagaatcccggtgcgtagtctcctgccagaatcttcggtccgaaggtatctaactgcttgcttcctgccgctccggtcgatacggaatcgaggaccgtctgaagatccaggccttttgccttcgcataggtgagtgcctcgcagactccagataaggtgccggcgatcatgatctggttcgcaagcttggcgtgctggccgcaaccggatcctccctggtagttgatgttggttcccatcgcctcgaataacggcatgcaggcttcgtagtcttctctggaaccgccgaccaggatggagagtgtaccgttcttcgctccggtgtcaccgccggtgaccggtgcgtccagtacatggaagcctcttttggttccttcttctgcgatcttctggtccagcatcgggcttgtggtcgtcatgtcgatcaggtatgtgccttcttttgcgctctctaagatgttgcctgcatcgaagtagacttcttctacgtcggtcgggaagcctacgatggtgatgactgcttctgcgtcttttacgcagtctgcaatggtgtcgtggaaggtggctccttcgctgatcacgtcttcgactttggatctggttctggcgtagatgtgtaattcgaatcctgctttcatgagattgcggaccatggatctgcccatgatgcctacgccaatgaatgctattttgttcattgatttttcctccgtggtctgattactcttctactttctccactacttcaccctgtctcttgtagatgctgtgtgccggtacgaatcctctgacgcttgacagtgggtagatgttgctgtggcttccgatcacggttcccggattcaatacgctgccgcagccgacttctacttcgtctccgagcatggctccgaatttcttaagacctgtctcgatcctttcgtctccggcttttactacgacgagttttttgtcggatttgacattggatgtgatggatccggcccccatgtgggatttgtagccgaggatggaatcgcccacgtaattatagtgcggcacctgtactttgttgaacaggatgacgttcttaagttctgtcgaattacctacgactgcaccttcgccgacgatcgcatttccgcggataaatgcgcactgacggacttctgcgttctttccgatgatcgccggtccgtggatgtaggctgtctggaatacggttgcggatttggcgatccaaacgtcttcgccgacctgatcgtattcatctgccggaagggtctttccgagttctttgatgaagccgctgatctttggaaggatttcccatgggtaggtggctccttcgaagatgtcttttgcgatggtttcatccatgtggttgtagaggtttttgatggttaattgttctgacatattggttctccttttttattttttagtttttccggtctttctcaccggcttcttataaaactgcgctgccttatcatagcacgcccgcatctgatactgattgttcagacctttgactgcaagtgtgcgtcttgatacaaaatcatccagctttttcatatattcatctgatgtgatatctccatctgccacatacgtcagacctttttcccagcttgccgtaagttccgggttcaggagcggccggatggaatggtctacgacatcgtagatcatttcccctaacatcgtcggcgtgacgatctgggtctttttattgagcgccagatatttattattgaataatttcttcagtatctcgcctctggtggcactggtgccgattccgcttcctttgatctgggcgcggagttcttcgtcttcgatgagctgtcctgcattttccatggcaaggatcagtgaaccggaattgtagcgcttcggcggcgaggtcttgccttctttgatatccagggactgtaccgaaagggtcatgcctttcttgaggctctggatcctggcgaagaaggctacatcagtgtctttgtcctcggtactgtctgctctgctgtctgtattgtcgttattatcgttattgtcgttcttcctgcccggcacgcctgtaactttcagatagccttcttctgccagtactttgaagcttgagaagaaggattcttctttgatcttcgtcacgatcgatactttctgatagacagccggtggataaaagatgcttaagaatcgtcttacgatcacatcatacaccctctgtgacagattcggaagtccttttagtgctcccataccctgtcctgtcgggatgatcgcatagtggtctgtgatctgtttgtcgttgacatatctcgtcttctccagtcctttgtgactgccgaatttcacgatatcctgaagatatggctttgccggttcgtactgcatcagaccgtttaagttcttgtggatctcttttgccactgctgtcgataggacacgggcatctgttcttgggtaggtgacgagctttttttcatatagttcctggatgatccggagtgtctcatctgggctgatcttgaaccgcttggaacattcattctgaatctcggccaggttgaataataacggcgggttcttcttttctttcttcttttctatggacacgatctggcaagtcaggggctggctggcgtctgactcgctgttgcttaggaagcggatcagttcttctgccttttccttttctttgaatccattttccttatagagatcgaaggattcgaaccattttgatcctttgactgcccgccattcgccttcgaatgttgcccctttctctccgatggtgcttaggactctgtagaacggggtctctacgaattcccggatctcccgttctctgcgtacgaccataccgaggacgcaggtcataacacgtcctacggatacgacggaatatttcgtattcaggtaattggagatgctgttgccgtattttaacgtcaggagacgggagaagttgattcccatcaggtagtcttctttggctcttaggtaagccgatgctgccaggttgtcgtattcttttaagtcttttgcttctttgatcccgcgcaggatctcttcttctgtctgggagtcgatccatacgcggcggcggttcttgccttttacgcctgcctgctgttcgaccaaacggtagatgtattctccttcccgtcctgagtcggtacagacgtagatggtgtctacgtctgtacggttcagaagtcccgatacgattcggaactgcttagataccgccgggatgacttcgtatttgaactcctgcgggataaaaggcagagtctcaagactccacctttttaatgccggatcgtattcttccggatagctcatcgtgaccaggtgtccgacacaccaggttacgattgcttctgctgattcgagatatccgtcttttctctgtgtattgatatgcaatgccttagcgaactcctgtgctacactgggtttctcggcaatgtataatgattttcccatgttactccttccagtagggtgaaacagcggctttttcttttatctttttctgtgccagagagaccggaaaaaggttatcactcttccgccgccacagttctcacgggcacgctgctgacttttgtcgacttcttctgctgcttttaatgcttcttccatgaaagctgcctgagaatccaccgcttttatgccgccggcccgtttcatatatgtgccgtctttctgcatgatccttgctttcacgttatcatttaacataatcttcagatcatggttgatctgacgtctgatctgcccgtctaataccgggcaggctacttctactcttttttctgtatttcttgtcatcatgtctgcggagccgatatagatcttctgttcttttccggttccgaagctgaagatacgtggatgttccagatagcggccaaccacgctcatcaccctgacattttctgtaaatccaggcactcccggtagtatacagcagattcctcgaacaatcaagtctacccttactccggcgcaggaggcctcggatactttctttatgaagtccacatctgtcacggagttcatcttcataatgatgcgtccttcgcttccttttatgatttcttcgtccatcatctgtaagatacggctctttaagctgaccggtgatacgatcaggtattgatagctgccctgcagattgccgatggacatattcttgaaaaattctgcggcgtcctgtccgattcgcggatcagcagtcatcaaggacagatcggtatacatggcagctgtcttctcgttataattgccggttccgacctgtgtgatatactggatgtcattgcggttcctgtatgtgatcagacaaatcttggaatgcactttgtaaccgtcgaatccatagatcacacggcatcctgcttcttccagacgttccgaccagtcgatgttgttctgctcgtcaaatcttgcacgcagctcgatcagcacggtgacttcttttccattttccgcagctgcgcacaggtattctaccagtcttgccttcttcgccaggcggtagatagtgatcttgatcgtcataacgttcggatctgccgcggcatctttgatcagcttcaggaacggatccatgctttcgtatgggtagaacaacaggatatcattctttttcacctgttttaacatgtttccgtcctgtacatgtgctgatttttgcggggagaatggttcgtagaccagtgctttcttcatagactccgggagatttcctgcgatggagaacatataatccagtttcatcggcatcttcgtgcggaagatctgctccggtgtgatcttgaatttcttacagaagtattcctgcatttccggtgtcagtttctccgctgtttctaatcttactaccgccatcctgcggcgtttgtgcagggtactctgcatgagtttccggaaatcatcggtaacctccagtgcttcatcgtccggagatacgtctgcatttcttgtcacgcagatgtagttcgggtcggatacttcgtactggtcaaataccagatccaggtattccatgatgactttctccatgcggatataacggatgtcatgtcccggaagcatcaggatatcggatacataggtcggaaccggtacaattccgaggatctgttctttttctttgtcgtctttattcttcctgctattgatatgcttcagattggctgttacgtagatatctttattcataagatgcgggaacgggtggctgctgtctacgatctgcggtgacagtaccggcaggatctgctctttgaaacatttcttaacatatttcttctcgtctgtctccagttctttaaagtccagtccgcagactccgtatggggacagttctttcttgatcccggcgtaggtcttgtcacgttctttatataacggggcaactgctgcgtagatcgcatccagctgctcctgcggtgtcattcccgaccggctgtctctgtgtctgtcgtctgtctgcaccatatcatagaggcttccgacacggatcatgaagaattcatctaagttactggtgaagatggccacgaatttcatacgttccagcaatggcacgctcttatctcttgcttcttccaatacacgctgatcgaatctcagccaggaaagttctcggttctgtgtgtagtttaatagttctcggtccatagggtctgcctccgtttcttgccggtgccattggtgccattggcactttgtaatcagcgaatttattgtatactttattatagcaaaaccatcttttattctcaacactgagatgtattgtgttcagatttgtaatctgatttataatctgattgatatcggtaagcggggtcgaatttgctggatgtataatgaaaaaaaggcgagaactacgccttttcacatgttgcagttcccacctttttattattattttatgctctcaccttatgaacgataaacaggtgagtatgagtgtgccaccagggacactaaaagagcctgttttcccgtcccctggctactttgcctgaatatatcccttggcagtcagtgcttcggcgcaaagtacggctccgcctgctgcaccacgtactgtattatgagaaagtccgatgaatttgtaatcatacatgctgtcttctctcagacgtccgatagacacacccattccgttctcataatttacatccgcttttacctgtggtctgtcatcttctgacagatactggatgaactgctttggagcacttggaagttctgcttcctgtgggaatcccttgaagctttccagtttctcgatcagctgttctttagttggcttcttctcgaagttgatgaatacagctgctgtatgtccgttgagtacaggaactcttaagcactggcatgtgatctttggttcttctgcaagtttgatttctccgttttccagtgttccgagtacacgaagaggttctttttcactcttttcttcttctccgccgatgtatggaatgatattctcgatcatttccggccagtctttgaatgtctttcctgctcctgagattgcctggtatgttgttacaacaacttcttttggtccaaattctttccatgctgcaagtgcaggtgtatagctctggattgagcagtttggttttactgcgataaatccgcgtgttgttccgagacgctctttctgagtcttgataaggtcaaagtgtgctgcattgatctccggaactaccatcggcacgtcttttgtccagcggtgagcactgttattagatactacaggggtctctgtctttgcatattcttcttcgatcgctctgatctcatcttttgtcatatctacggcactgaatacaaaatctacagtagaagcaacttcttctacttcatttacattctttacgattaagttctttacaccttccggcatcggtgtatccattttccaacgtccgcctacggcttcttcatatgtttttcctgctgaacgtgggcttgctgctacagttacaacctcgaaccaagggtgattttcaagcaatgagataaaacgctgtccaaccattcctgttgctcctaaaatacctactcttaatttcttatccatctttgttctctccctttctttttatcattccttaatacagccttacgctaccttcatccgtatgacatgtactagtatttataaatgtatattttaatattcttccatatatttctgataagccgcaattgattttgccatagcatcttttcctggtgctcctatggtgacacgcttattcacacatgtctcaagatcgattgctttatagatatcttcttcaaataccggcgagatctttctgtactcttccagtggaagttcatctaacggaatcttcttctcaatgcatgtcagtaccagttttcccacgataccatgtgcatctctgaatggtacaccatgatttaccagataatctgctgcatctgtcgcattggtaaatccgtgttttgcactttcttccatgcggtctttattaaactgcatcgtctttaacattccggcaaataatgtgatacatcctttggctgtatccatagcatcaaatgcccattctttatcttcctgcatgtctttattgtatgcaagcggaattcccttcatcgtagtaaggagtgcatttaatgcgccgtatacccgtccggtttttcctcttaccagctctgcgatatccggattcttcttctgcggcatgatactgcttcctgtactgtacgcatcatcaatctctacaaactggtattcattcgaattccagatgatgacctcttcacagaatctgcttaagtgcatcatcataatgctcagtgcagataacagttccaacagataatctctgtctgatacaccgtccatgctgttcagtgtcggtccgtcgaatccaagtaattctgctgtatattcacgatccagtggatatgtcgttccagcaagtgctccagagccaagcggacatgtattcattcgtttgctaatatccttcagtctctcatgatctcttcggaacatttcaaaatatgcccccatatgatgagccagtgtgatcggctgtgctttctgaagatgtgtgaatcctggcatatatgtctcgacattctcctccattacatgaaggattacttccagaagttcttttacctgagcatcaatctcctgaatctcatctctggtaaaaagtttcatatctaatgcaacctggtcatttctgcttcgtccggtatggagtttctttcctggatctccgatgcggtcgatcaatgttgcttccacaaaactgtgaatgtcttcatatttgtctgatatctctaatttaccggattctacatctttcagaatgccatttaatccgtctgtgatctgttctttttcttcttccgttaagattccctgctttgcaagcatagctacatgtgcaagacttcctctgatgtcctgcttatagaatcttttatcaaatgtaatggaagcattaaaattatatactagctggtctgtctcttttgtgaaacgacctccccataactgtgccatatggattcttcctttcatttttaagtttactgttttcgattttaacacatttccgcataaaagcaaatattattacaggaatttacatatttattcatcacaaaatgcagttacttacatgaatacatgcaatttcttcttactttttatgcatttttattactatgcttttgcccggtgctcttccagacgctgccgcatcgagaattcacatccgcagtaatcctgcctgtacaggccatactgtgcggataactctacagatcttttatatccgttctttttcttgaaatcggatgtaagatatgatacgccatactcttctgcaagttttaatccgatctcattcaatttggctgcatttttcaaaggactgatgctgagtgtcgtcgtaaagtaatcatacccgccttcttttgcaatctcagcggtctctcttaatcgaagttcataacatttaaaacagcgcacgccgccttctttcactttttccagtccctttgccatctcataaaacttttctttatcatagccgcctgcaataaactgtaccggatattttgtatccatctctccaatcagtgtctgctgttcaatgatacgtttgctgtattcactctccggataaatattcggattatagtaaagtactgtgatcttaaaataactgctcagatactccagtacataactgctgcacggagcacagcagctgtgaaggagaagggttggtaccttttcttctttttgcagatgatcgatcagtttatccagttctttctggtaatttatctttgttaacatctaattatcctctcttctctacatatcagcattttaccacacccgccttttttattcacctattttctgttccggtcatatcatattatatacttcacatccaggaggttcctatggaacagattttgaacctacagcatatttcttatacgtatcatactttagaaggggaaaccccggccctgtctgatatctcattttctttgaacaaaggggaatttgccgccatcgtgggaccttccggctgtggaaaatccacgctgctttctctgatctgcggtcttttgccttgcagtgacggacagatcacaatcaatggcagacacctgaaagagagtacaactaatgtaggatatatgctgcaacacgatgaattgtttgaatggcgcacgatctataacaatgtgatccttgggctggaaatccagcatgctctgacggcccggacgaaaaagcgggcacacgaacttcttaacctctatggtctgagtgattttgagaattccaggccttcggaattatccggaggaatgcgccagcgtgctgccctgatccgtacattagttctggaaccggaactattacttctggatgaacctttttccgcccttgattaccagacccggttacaggttggcgatgatatcggacagatcatccgaaatgagaagaaatccgcgcttcttgtaacacacgatctttcggaagccatttctcttgccgacagggtaattgttctttcccgtcgtccggcagccatcattcagactattccgcttatctttcatctggaagaagatactcctatgaacagacgaaatgcaccggaattcaaatcttattttaatctgatatggaaggagctaaatcaggatgaaaaatcttcataaaagcccaggtaccggtgctccggcggcactttccaccggacaccggcactatctcagacattatcattttcacagactgctggttatattcttccggatcttccttttaacgggatttttattcctttgggaattttgtgcgtcacaccagatcatagattctttcatcttcagcagcccctccaagatcatgaatgctttactcttaatgatttcggatcatagtatttttctacatctcggcgtcaccttatacgaaactttcgtcagtttctttcttgttattttcgtcagtatattatttgcaattcttctgtggtacagtaataacctttcggaaatcctggaaccttaccttgtcgtattaaacagccttccgaaatctgcactggcccctcttcttattgtctggcttggcgctacaaaaaccacgatcattgtaaccggaatgtccgtcgctatcttcggcagtatactcaatctgtataccagtttccgctctacagatcccggaaagattaagttaatctataccctcagagggaaccatctgcatgtactgaccaaagtaatccttccttattctattccggctattatcagtaacatgaaagttaatatcggattatgcctggtcggcgtcatcatcggtgaatttctggccgccaaagaaggccttggatatcttattatctactcaagccaggtcttcaaaatggattggcttcttatgagcatatgtattctctgcgtcttcgcgatatttttgtacgctctgattgatttcggagaaaaactttattttaaacatttttaaacctccgcatcagattccctgccaaaaccataagatcagctgatctcctgcaaataaggtcatcataattcccagcaccaaaaacgggccaaatgcaaattcatcctttctggtcagctttccacatttcagcataataaggcaatatcctcctgcaagcataaccgcacatgccatcgaacaaatgattttctcttttccaagcagaaatccggaaactgccatgaatttgatatcgcctcctccaaatgccccgggaatcagaatggataagaccagcatcggtcctgccacagctgctgccccggggatccggttgtataaatcactgttccctgtcagtaccatatctgctgctgcgatcagcaatatataaatatgatatctgccggggatcttacgggtactatgatccgttaatgccacccggcataagattccgagataacataacaaccgtatcccgttcaaagatattgcagtggatttcgtatagttaagaaagccatctgctattgttcttacttctaccatctcctgattcatttactgttattctttttgggccattttttgtatcaataacatttcccgcaaggtttaaggccctgtgcctctgcttcttcctttgtctctttctttgccgtatccggattcatattaccgcagtggttcgttttatggtattttgaaccggttgccgatacccatacctggtcttcggttactttctgcgttgtctgtttcgttaccgtctgttccgtcacagtccccttatctgattcatctcccggtgtataatcattacacggtgccgcactccaattcagatttttaccgtcacttgttactgtgaccgttccctgtttgtcggttctgtacacctggatttccatactctgaagtttatccatcgtatctttgtccgggtgtccatatttattatctttcccacagctgatcaccgcatattccggtacggttttctgaaggaaatcccaggatgttgccgttgctgatccatggtgtccgggtaccagtacatcacagtttaaatctataccggaattgcacatcgccttttcgctttcatgctctgcatctcccgtaaagataaaactgttctctttatttgtaagttttattgcaacggaattattgttacttcccttagcttctatcgtctccggtgccagtatttgaaacgaagcacttccaagcctgtaagattttcctaccggcggatgcttcattttcaatccgtcttctttcacagcttttacaaacgaccggtataacttactggtatgtacatagttactggatataacatttttcaccttaaagctcttcaggcatccgatcagacccgccatatgatctgcatcataatggctgctgatcagataatcaatcttcgtaacgccctgttctttcaaataagctacaacaaatcttgaagtctttcgatctcctccatcatagatcagatttttcccatccgactgaaccagaatagataatccctgtcctacatcaaggaaatgtactttcactgtccctgatggaacagttgagttattttccgcagcctgcgtccgtacactcacagacacccctgtcattgccagtgccataaagatcgaaagcagtgccgataacagtctttgcctccatatttttttcatttttcttctcccctttcacacccacaattctattatacacgaaaaaaagaatccctacatcaaggattcttctttatatctcattctgtatataagctggaaatcggacttgaaccgacgaccccttcattacgagtgaagtgctctaccaactgagctattccagcatgctcttataacaggcacgaatataattataccgtattttcacatatttgcaagtacttttttaattattatacgttcttttccgaaaaagattttaacagattctcatatgcaaaccagaaattctgccacggccgcttaggattctctcttccatgcacgtcacggcagatctgtctggccttacatattttcatccagctatttatcctctttcatgtgcaccgtcacttgtggatatggaatctcaattccattctcatccagttccactttaatttcttccagcagtctccatctggtcgcccagtactcttcgttcttcacccaggcacggataccgagcacgactgcactgtccgcaagatcatttacaaagacattcatctgttcttcttttagaatacttgcatcttccgacaacagcttttcgatcattgattttgcctttttgatatcggcattataagaaatgcctacccgcagatccagttgtctttcgtcttttgccgttgcattggtgatactgttattcgtcagcattccattcgggattacgatggtcttattgtcaatcgtacttaattttgtataaaagatctgaatttcttttactgttccttcttttccattcgtatcttcaataatataatcccctaccacaaatggctttaacagaagaatcagcacgcctcccgcaaaattggaaagacttccctgtaacgcaagaccgatagccacaccactggatgccagtaacgccgccaccgatgtagtatcaaatccaagactggagatcaggcaaaagatcagaatcccgtacaatccatatttcaaaagtgagtctacaaactgttcaactcctttatctgcttccgaacgttcaaatgaacgcctcacaatcttcctgatccactttatcaccagtcttccgataaagaaagcaaccagtgccgccagcacttccagtccaaatgtaatcagtcccggaatactgtcctgcagatattgggtaatctgatttacctgttttaccgcctgctgggtagcttcggtcacttcctgagtcgtatctgtgatcgttgttgtatctgtcatatcgtttgctcctcttatttcagtgccagaaatgcacttagatttcctcttttatttcccgttgtgcgatgtgaaaacagaatatccgggttacagtgtgtacacacatttgtcacagcaatatgcttcttcaaaattccggcttcctcgaataccaattcatttgctttccacaggttcaactgatatttaccgttttctttctgatagaataattctggccagtatttttcttcaaagcttttctgaaattttacaattacatcttcacttacctcgtaacagtcctgacatatagacggaccaatggccgcaagtatgtctttaggatccgaaccatatgttttttgcatcagttccactgttacttttccgatctttccaaccgttcctctccagcccgaatgcgacagtccgatcgcttttttcacaggatctacaaaatacagtggtacgcaatccgcataaaatgtcaccagacagattcccggtacatttgtgatcattccgtccgtttccataaaacgtcttcccttgtcctctgctcttactaccgccacatttgttgtatgtgtctggttggtaaacgtcatatcttccggctttactccgatggctcttgcaatccttctctggttttcctcaacatcttccggatcatcgcctcttgttgtgctgatgttcatagttgcccagcatcccttgctgacacctccgagttttgtagaaaatccatgatgcacgattcccgtttcttctaacattggataactcagaaacggaaccccatctactgttttttcatcaaatatatgttcctgatttttatactgtaatccaagactcattctcttctcctatatttccacataatcaaatgcattctgatataaaatgatcctgtcatcttctatacttactacatcaaacctgcacgggatttcatctattccattcaccgtcatataataaagtgcactttttgagataactctctgtttggcataatctaccgcctctgccggagttcctttccggtcatctgcccggtacttcacctcgcaaaacaccagataatcgccatctctggctattatatcgatttctccgaatctgcaccgataattatattccagaatttcatatcctttttctgtcagatatactcctgccattctttcataataacttccggtttcacggttatttcgtctttgtcctcttttcgaccctgccattctttcattcctttacactgctgattccatgcctggatnnnnnnnnnnnnnnnnnnnnnnnnnnnnnnnnnnnnnnnnnnnnnnnnnnnnnnnnnnnnnnnnnnnnnnnnnnnnnnnnnnnnnnnnnnnnnnnnnnnnnnnnnnnnnnnnnnnnnnnnnnnnnnnnnnnnnnnnnnnnnnnnnnnnnncggagatggtcccagttctttcagcccctcaatatgcttcttcgttccataccctttattacttgcgaaatcataccccggaagtactttatcatattccaccatcagccggtctcttgttacttttgcaatgatacttgccgccgcaatagacacgctcttggcatcacctttaatgatcggcacctgtgggatctctacctccggtattgttactgcatcattcaacaaaagatccggctgcacctttagattgccgattgccatacgcatcgcctcataagtagcctgcaaaatattgatctcatcaattcttgccggacttacaacaccgattcccgttgcaacagcacgttccataatctcatcgtacaatgcctctctttttttctctgaaagtttctttgaatcattcagatacaaaatcgggtcatcctttggcaagataaccgcacctgccaccacaggacctgcaaatggcccacggcctacttcatcaataccgcaaatatactggcagtcgctgtgttctttttcataaacactcattgcttctgttctttccagttcttttttcagtttttcctgctgcctttttagtttttcttcttctcgtttattcatgacggatcactcctatattgtcaaatggataaattcttacccatgccctgccaatcagatcttcttttgtcagtacgcctacacttggatccctgctgtccatactatggttacgattatctcccataacaaaatactcattttcttttaatgtaatcggatctgcggcagtctgtggatctttgatcaattcatttccatagatatcgctcaaaagcctctctccgtcaatgtatacatatccgtcttttatctgcacagtctctcccggcattccgatgatacgtttgatataatatgtattttcttcgtatttgtacggaaatacaataatgtcataacgtttcggatcacggaagcggtaactgatcttatccacgatcagattatccccgttttgcaacgttgtctccatggaagatccactcactcttgttctctgccctacaaatgttatgataaaatacgttaaccctatgatcagcagaatatagacaatccatcctccaagctctctcaaaatgctttcttctgcatcttctcttgaacgtctagccatgttcttttgttgtttcccttctatactttctgcctctgtttttaatatgcatccgggtactccagtgtcagtttgcccaaacgtccgttgcggaagtcatccatcagaagaaccgaagctttttctgtatccagttcatttccacgaaccagacaatgtctgctctctgcaattttttccaacattccgtatggatccgtgtcttcttctacattatatttattctcaagtactcccggataattttcattcataaactttacaagttctgccgcaagttcttctgtctgaaggatctcatctttgatcgatccgataaatgccagtttcaggcctactgcctgatcttcaaatcttggccacaggattcccggtgtatccagaagctccacatttttattcagtctgatccactgctttccttttgtcactcccggtttgttaccggtttttgcacatgcctttcccgcaagtgcattgataaatgttgattttcctacattcggaattcccactaccatagctctgaccggacgattcaaaattccacgctttctgtctctttcaatcttttctttacatgcttcctggatcacaccattgatagatttgatcccgccgcctttcttggaatttaccttcacaacagagaatcctttttcacgaaaatattctgaccaggcatcattccacttatcttctgccagatctgacttatttaaaaggatcagtcttgctttattctttcccagttcatcaatatccggatttctgctgctgatcggaactctggcatcaaccagttcaataaccagatctattaatttgatattttcctgcatcatgcgttttgctttcgtcatgtgcccaggataccattgaaaatgcatatattatttctccttatcttctatttcacaaatccccagttttttttcggggatgccacaaaccatgcctttccatatatataagaacgttttacttttcctatatcggcactacggctgtcctcactgttttttctgttatctcccagaacaaaatattcatcaccgccaagtttcaacttctcaccggcaattccagctgtatctatttttgttgttttataatcttcttccagttttttaccgttaatatagacctgattctccacaatctgtaccgtctcgcccggaagtccgacaatccttttggtataataatgcgaattctcattgcctttcggtttgaacacgataacatctccccttttcggtgaagaagcattgtacacaatccggtttaccagtactacatctgcattcttaagcaccggactcatggaatctcctaccgtactgacccgttgtccccagtaccacacagcaacaaatgccaccagacaggtgaccacgatcttaaaaatccaggtaaatgtagaagcgatcatttcaagattaagatgtatctttttctttgcttttggaagatttccgaagccttttttctttgctttgcgtctgcgataaccggttttccgggatcttcttcttttttcaaaatccagattacttctgcgtctcataaaatccccttatactgaaaacttgccactggcaacttttcttacatactttgatatatcagaaaaaggacaattacattatgtagttgtcctttttctcattttgttacattttcgattattttactaattctttaactttagctttcttaccaacgcggtctcttaagtagttcagttttgctcttcttactttacctcttcttactacttcgatcttctcaacgtttggtgagtgtaccggccaagtcttctcaacaccgattccgttagaaaactttctaactgtaaatgtttctcttgctccgccaccctgtctcttcaggactgttccttcgaaaacctgtactctttcacggtttccttctttgatctttccgtaaactttaacagtatctcctacgtgaaattctggtgctacttcttttaactgagcagcttcaatgttcttaataatatcgttcattatgtgtgacctccttgtttacttggatgttcttaatacattcgtaccagaggaccatctatttcttcacaacatgctacattttatcataccctgcaacaaattacaaggatttttttacttctttttgcacttcttcggccagttttttttctttttctgtaagttcggctttttcaagcagatccggccggttctttgcagtgcggatcacagactgttcacgtctccatttttcaatattggcatgatgcccggacatcagtatctccggcacttttctgtcatgccatacttccggtctggaatattgcggatattccagcagattatcctgaaagctctcgaactcggcggacacatcattatgaagtacccccggaaccagccgggatatcgcatcgatcatgatcattgccggaagctcacctcctgtcaggacataatctccgatagatacataatctgtaacgatctcttccaacacacgttcatcaatgccttcgtaatgaccgcacaaaaataccagatcttcttcctgtgcaaattcctctgccatggactggttgaatgtctttccctgcggagacagatagatgactctggtacgcttctgctctcctgacatctctttcttctcaccagatgccagcttttcttctgtggcttttgcctttctttccgtaatctgccttgccagtgcatcatagcactgatacaccggttctgcctgcatcagcatacctgcacctccgccatacggataatcatccacgctgtgatgcttgttaaatgcataatctctgatatttaatgcctctatagacagaagccctttatttaccgcacgtccgatgatgctggtattcaatccatccataaccatctccggaaataacgtcataatataaaaattcatagattatcctctttctagatcagaccatccatcagatggatcttcatcttctgattttctatatcaacatccaggatacattcgcggatcgccggaaccaatacctcgccgtgttcatctgtatcgatcacatagacatcatttgcaccggtctccataacatcttttaatgttccgaacggtttatcatcctctgttacgacctcgattccgatcatatcggcgataaagtattcatcctcttccagttccaccgcatctttacgttctacaagaagtggacatcttttataacgctcaatatcattaatattatcaattcccttgaacttcaggattacaaactgcttaaagaatttgacaccctggacttccagagattttttctctcttccggtgtctaacagtacatgttttaacgatttaaaacgattcgggtcatctgtggtcggaaatactttaacttccccacgcactccgtgtgtcgaagtaatgacacctacctgtaataattcttccataaatactcctttttcactttctgcgtttccgacgctccagcggcttcttttgtacatatgattctgccgtataagataagcgggacagaccacaagcgggcctgtcccgggacaaaatgggaatccccattagttatttagtccatgatatctacgataactttcttatcttcctttgctgctgcggctttcacgactgaacggattgcctttgcaatgcggccctgttttccgattactttacccatatcagattcagcaactcgtacttccagaactgtcgtcttcttctcttcgcgttcatttacaacaacgctttctggatcgtcgactaatgctttcgcaattacttcaactaattccttcataaatgcacacctccagtggcataattatttttcgatgcctgctgcctttaagatctttgcaactgcttctgtaggctgagctccgttagcaagccatttcttagctgcttcttcgtcaactttgattgcacttggatcacagttcggatcgtatgttccgatctcgtcgatgaatcttccgtctcttggtgatctagaatctgctacgatgattctatagaaaggagccttcttctgtcccattcttcttaatctcatttttactgccatgttagtttacctccgtaaaattataatattttcatagtttatttttatctatataacgcggaattcgcggtatatcatgtttagaacggaaatccaaatttcttcttctttcccggcttgccaaattgtttcatcagttttttcatctcgttgaactgcttgatcatacggttcacttcgctgatgtccacccctgcacctttggcaattctgtgctttctggatggagaaaggatatccggattggctctttccgccggtgtcatggaatgaatgatcgcttccattcttcccatcttcctctcggcttctgccgtctgctcgtcgtctaatcccttcatcttaccgcccatgcctccaaggcccggcagcatgttcataatatttccaagaccacccatgttcttcatctgcttgatactttccagataatcgtcaaaatcaaactggttcttcttaagcttctgggtcatctctctggctttttcttcatcgatctcggcttccgccttttcgataagcgacaggacatctcccattcccaggattctcgatgccatacgatccggatagaactgttccagatctgaaagcttctctcccatacctacatacaggatcggctttccggtaactgcctttacggacagcgccgcaccacctcttgtgtcaccgtctaatttcgtaacgatcacaccatcgatgccaaccttttcattgaactcttttgccacatttacggcatcctgtccggtcattgcatcaatgacgagtatggtctgatgtacttctacttcttctttgatctcttcaagctcagccatcatgtcttcatcaatatgaagtcgtccggctgtatcgaggatcacgaggtcgttgccattcttctgcgcatgttcgatcgctgccttggcgatgttcgccggcttgtggttttctcccatggagaagacttccacaccctgcttctcaccgttgacctgtaactgcttgatcgcagccggtctgtagacatcacatgcgaccagcagcggtttcttgccctttaacttgaactttccggcaagctttgctgtcgtggttgtcttacctgctccctgaagacctgccatcatgataactgtgatggcttttccaggctgaagcttaatctctgtggtctcagatcccatcaaattgatcaattcttcatttacaatcttgatcaccatctgccccgggttcagaccgttcatgacatcctgaccgatcgcgcgttcctgtacgctcttaatgaagtcttttaccactttaaagttaacatccgccgcaagtaatgcacgtttgatctcttttaaagcttctttgacatcatcctctgtcagacgtcctttgcttctcaggtttttaaatacattttgaagtttctctgtcaaactgtcaaatgccatgctataactcctctataatttcatcggatatcttccggatgtctgcaactaacttttccgcattctccttttcatatccgtccagcaattcatcaatctgctttactttttctctgatcgacacgaacttctctaccagatgaagtttctcttcgtagcctttcagtgtctgggaacatctctttaccagatcatgtacgccctgtctgctgatcccctcttctcttgcgatctcgccaagtgataggtcctcaagaacaaactgttcatacacttctttctgatgattggtaagtagttctccataaaaatcatataataatgcctgttctaatatttcattcatgtctttcacctgtgatatcatataacacttccgtgcaggtgtcaagtgttttttctttacaccttaattttttcaaaataaaattgatttccccgcaactttgtcgtaatatatctgatggaagatattgccgtctgcagtatcttctaatcaggtccatatattataaggggagaatataatggcaaaaaagaattattacaagatacttggtgtgtcacgaacagcttctcctgaagagatttctgctgccaagaacagacttgcaaaaaaatatcatcccgatgccaacatgaaggatggtatcgatacaactaagaaaatgcagcgtattctggaagcttaccgcatactttccgacccaaagaagcgtgcttcctatgaccgcaaagtattcggaaagccatcgtcagactctgaccggaatttcgatctgttcaatctgcataataatatagaagaaacagatccggtcatcggtacaccattcgtgaattactggcgggcggcagactccttatacgatatcactttagaaagcgaacaacttttcaaagataagaataaagaaaatacacgatcggcccgcttgtcagacctggcagcccaggcacttagctatgccgtaaccctgcgcgaagccgagattcctgaaaagtactggctgcccgcgatcatggactggctgcttttcacctggtacaagaacagaaatcttccggtatcttatttattgaaactttacgatgaatattcaaaaaaagaactcaacggattcaaacgtgtaaaaatccaaaaagagcagcttcatttccagcattctttaaaacggctggttaattacggataattttcatctcacacatttacaccatctgcatattatgtactgtaaacatcattattggaggattcaatatgagcgatttaggtacagcaaactgtggatgtggctgcgaaggacgcgacagattcggcggagactgtggatgtggtggatgtaacggcggatgcggatgcggcaacaacggatgtggcttcggcaataacagctgcctgtggatcatccttcttctctgttgctgcggcggtttcggcaacggctgtggatgcggcaacaacggatgtggcaacgacagctgcctgtggatcatccttcttctctgctgctgtggtggtttcggcaacggatgcggcaatggctgtggatgcggatgctagacaacataatatttcctgcataggacttaagagacggagtcatttttccgtctcttttttcatatatatttataacgctgatcccgggaggagtcactatggccggaaaaccttcaaaaccaatgacaccatttgataaatctgtcacaccctcctatttatataaattgaagctgtttctttcctttctgcctccttccactcagcgcttccttgccgtctatatcaaattttccgaattccagtatacgatgaattatttccgcggactgccgtttcatgcattttcttttcaatctatcggtgaactcgcaccctatatggatgaaaacgaacggaatatgatggaccagatgacttctatgctgcagataatggaaatgatggtgatggcacagaccgattctacgtccggaggttccgattcttgcggtcctgcaggacctgttgatcttatgaagacaatgatgtccggcgaagatatggaaatgttccaaaattacatggacctgttcgaccaggaactttcctcgcttggaacctctgccatgaaaggagactcttcacatgaatggaacaacgaatcatacagcgaatgaaaacacttccgaaaacaattcctcaaacagttggatggatcatccggccatgaagggaatggacccggtcaaactggagttgatccggcttgcagccaaacagaccgccggcaaaagcgggagatctctggctcccgttatgatggcgctcatcaccagtgcgaacaagaaaggaatccagttcactccacaggaaatgtctctcatcctcgacattctgaaagaaggacgttccagagaagaacaaaatcagatcgaccagatggtgcagatggtccgtacacacatgaaaaacaatacttaatttcttttcgttctcagatatgcgcaaagaagaaggacagtttaaagcccttcttctttgcgcatcatacggagttctcttctcttttctcccttttcccattcttctttttcttcttccgtctcaagttccaatcttggcgccctgaccggtttgtcattcttatccaatgctaccattgtaaaatacgcatgattgatcggtgtacgctccccacttaacgcttctacatacgtatccacctttacttccatggatgtattaccgacataggttacctttcctatgatcacaactgtatctttgacatatgcaccgcgcaggaaacttaagctgtctacagatgccgtaattacatttcttcttgtgtgacgttttgccaccatacccgccacttcatcgatccactgcataagcgctcctccgaacaaacggtctgacgcattcaaatgttgcggccttaccatatggactgtctccacgattgaatccgatacctttctactttctatttccacaaaaaacacctctctttttctttttaagctcttttattatagcaccggatttgttatacttaaactaatttcaatgtaagtattctgaaattcatgtatttagttatatacaacatcaattattagacaggctgcatttcgcagcagaatggagttttcatgagaaatataaaattaacgatcgaatacgacggaagccgttaccagggatggaccagactgggaaaagatgaatctggcaataccatctctaataaaattactgaagttttaaaaaaaatgactgaagaagatgacctggaacttttctgtggatgccgcacagaagtcggtgtacatgcctatgcacagattgccaatttcaagacttcttcttccacaacgacacagaacatcaaacattacctgaaccgttaccttccgatggatatcgcaatcatcgatgtaaaagaggttccagaacgttttcacgcacagctgaacgccacatccaagacctatgtataccgtatgacgatcgacgatgtaccgagcgtctttgatcgcaaatacacttaccattgctaccgtatcccggacaaacgtctgatgcagcaggccgccgagaaactcacaggacgtcatgatttccgcaacttctccagtgcaaagaaaacgaaatctacggtccgcgagatctttgatattgatatctatggtgacattgaagaaatgcagatcctgatccatgcggatgattttcttcataatatggcacgtatcattatcggaacgctaatggatatcggacttggcaaccgatctgtgcaggatattgatgatatctttgcgggaattctcgaagcaagtgcgccttgtgatccgaagggattgtatttgcaggagattacgtattaaatttaattactattgaatgcatgaagcggtcgttacccggacctccataaaacttaggaactctttcctgttcagattccgtcggcgggaaaatctaaagggacaaaattctgctaaaagcaggctttcaaaatttgaaactcggcatacgcctcaaacagtcaaattttgaaaacctaacgcagaattttgtcccttaagattttccaacaccttctccatattcactggaaagagttcctaagttttattccgtgggtatcgcatgctgtaatgattcaacagcggagccgtaaccgttgtgataccggaagtatacaaaaagccggaaagtcaaggttttcaccacaactttccggctacacacaaaagttacaattccgctgttgaattttcagtagcattggccaatcacgacatgagaaagacttggcgttctcatggaccgagaggccatgatactgcattaaacaggattatacaacaataatccgcacccgtctcgccttcagcacttccacttcctccggcagaaattcacgatccgtaaccactcctgtatagtcttctaactgattgatccaggtcatggattgttttccgaattttgactggtctactgccagataggatcttgcgcactgcttcggaacctggcgtttcagccacatcttttcatgtgtcggtgttgttacctggaattcttcgttgatggaagctgctccaaagaatcctacatcaaaccggaaatccttcagcatctctgtcgcatatctgccaaacagacttcccgtctctttctgtaccataccgccacatatgtatactttcgcatcacttttttttaatacctgtgcaatctccagatcatttgtcacaatgataatatctgggatgtcccggattaattttgcaatctcgcaggttgtcgtccccgcatccagaaatactgaatcttgcggatgtacaaattctacacattttcttgcaattgcttctttactgttcttattactggtctgctttgtctcataagcaacctcttgtttcgcgaccgcacctccatgacaccgttcgatcatattaccgctttccaacttcatcagatctctccgaattgtcatggaacttacattcaattctttagccagctcatctacctgcacacttccattctctttgatcaattcaacgatcattgcctgtctttctgccgcaagcatattatctcctcccacattacgccagatctgcgatctgcagtcttttcattttttactttataaataaatttatagaaattatacaaattctgtctctattgtcagtgatatctcatattccggatactgtttcttcatatagtctgtaaatgattttcgcagtccctcccagtctctgagcgcatagtccacaataaaatcacaataaagagtattggttcctttgctcagatataacgcatgaaagctcttcacgtgctcatttacacgtacaaattttccaatgtatcgacggatgtcaacaacacttgaagtatcctcatcgactgcatagattccgaataccatcgtcacatgatattcttccatgatccgaagctgcagtctgtgaatctcttcatatacctctccaatgcttcttttatgatcaatttcgatattcaccgagcccgaatagcggtccggtccataatcgtgcaacatcatatctatcgcactgatcaccccgtctgttgcacggatttctttatataactgtcttgcaagttcttcttttcctgaacggccgatcagatccgatgccgtattcttaagcgcatctaccccactctttataactacaaaggaaaatacaatacccgcatatgcatccagtgaaaatcctgtaaataaaaatattacagatgacaaaatcgtaagtcccgagaaaaacgaatcattccttccgtcttctcccactgccagaagtacttccgattccactgattttcctatctttattgtatacattccaaggcagaacttcgtcacagctgttcccgccacgatcagaaccatcagcatactgaccttcatatccgatggatgtaaaattccatctatcgactctttcaacatactgatccccgcatacaaaatcagaataccgaccaccatgccggtcagatactcaatccttccatatccaaatgggtgcttttcatccggatgtttcccggaaagctttgttcctacatatgtcagaaacgaagatcctgcatccgttgcattattgattccttccgacacgattgctattgacgatgccagcgttccgatcacaattttcactgccgcgatcagtaaattaactaagattcctatcaaagacgttcttattatccgttcctgacggcttgattccttcataatacacctgttccttctttctttttcctgtgtttatgataacatgtcgttatttcatttacaagatattgcaggtgcagggcactctgccaaagctgtcacttgccaaaacatacaaaagaaacggctgtaagagccgacacgcattcattaacctcccaatgaagcatatccgttcttccagccgtctcaggcttttcttattatacgattcgtctcagattacataaatatattaagtatcaacacttcaaccacaccgacagcccatgctaccgttgatgttacagaccagatcgttagagtgcgtaatagctcactagtcgagaggtcctgcgccgaaaatgtccggggctgaaacacactgccgaagctcaggaattaactgatgttaattggtagaggagcattgtatacgggacgaagcagtaccgataaggagctgtggactgtatagaagagagaatgccggaattcctgttttataagtatcttttcttcccacgactgcatatatttcacctctgtcttttcacttgctttgatctgacaaatccgtctatgcatcttttgaattcgttcacttttacatacttctgacacttcatccgtactatgttccatatacttcaaaagttctatcaattctggtgacaccagttcaaaacttcattcaataaattgaaatcaacaactcccggtggcatatcgatcttaattcaatacataatttctggtcgtaattccgctcactcttcccttggcattgaccaatactgccttaaagatggtctctccttccggcatctctactggtccggtgtacttcgtagaagaagtcgtcggttctgatttatctgtcgtataatacgccgtatatccatccggtactttaatctcaatctcctgagcagtgctgtactgtccggttgacggggacactgccggtgcatcttcgatcggaagttcaacggtatatgattttttcaccggaaggcttggaatgcccgccttatttactgctattgcatagatcgttgtgtctccctcttcaatctgaatcggactattgtacttatggctgcctgtggttggcttcttcttgttcttcgtataatatatcttatttcccgattctgccgtcagttttaactgctgaacatcatcataatcctcaccgtcatccagactgaatttcggagtcttcactacatattccggtaattcatctgtgatcgtcgaagtcgcattatccagaagctccggaatcttctctttctgatcagaacggatatagaatttgatgcacgcacgatataattcgatattatcttcctgttttttcagtgcatccgagaacagacgctctgctttttctgtattatcctgtgcctgataaacttttgaaaggcctgtgtatgcttccggtctggtgtcatcttttgccatggcatttctgaagcagtcttctgcctctgtataatcatttctttcgagtgctttatttcccttgttgaccgcaccgatatatgatgtcatataagcaaatattccaacaattcctatgataagtaacagggacaatgcgagaagcagtgcacgctttttcttttttttgcgaagtgctttttgtcttgcacgctcacggttacggcgtctgcgttcatcctcattcatctgtctgcttctgtttcttgtattatttcttgccacacctgtactgcgtctttcatttcctctacggctgtcggttgtagatcttccagctgcatctctgttacgtgaaggccgggaataatacatctcatcctcatagccatcactgtctattgcaccttttatctgtgctgtaagcatatcatctaatgggttgtagtccggaacaatgcggacctcttttccacaatgtctgcaatacaattccccttcaggtattctctgaccacaatacctacatctcatcttatgccatcctcctactgtgaatactatcttttatccatttttctcattcaaatattgttcaaattcttccgaagacatcagaacttttcgaggttttgttccttcctccggtcctacggcgcctgcctcacataactgatccatgattcttgcagccctgttaaatcctatcttaaaagctcgctggagcattccgatagatgctttttccttctcaataatcagtcttccggcatctgcaaaatatgcatcattttcattaccttcacttccgccggatcctgatgccggatttccggtaggaatggtattcatatgcgtctctatatcctgattgtatgtaacatcgccgttatgttcacgcagatattctactacctgctgtacttccttatctgtaacaaatgatccctgtactctggccggtttctgatatcctgacggataaaaaagcatatctccttttcccagaagcttctctgcaccgttcatatctataatcgtccgggaatctacaccggatgatactgagaatgcgattctcgaaggcatattcgccttgataagtccggtgataacgttaactgacggtctctgtgtcgcaagcaccaggtggatccctgcggctctcgcaagctgtgccagacggcagattgcttcctctacatctcccggagctaccatcatcaaatccgcaagctcatcaacaataataatgatctgtggcataggctccagtttatcgccttcttcggtctggactccaagacttttgatcttttcgttatatcctttcatatctctgacattatatttggcaaatgcctgataacgtcttgacatctctcccactgcccagttcagtgcgcctgccgcttttttcggatcagtgactaccggaatcagaaggtgtggaataccattatacacactcaattctacaaccttcggatcgatcatgatcagttttacttcattagggtctgccttatataagacactcatgatcaacgtattgatacatacggatttaccagatccggtagcgccggcgatcagtacgtgcggcatcttggcaatatctgctaccacagtctttccgccgatgtcctttcctactgcgaaagatatcttggaagaactgttcttaaattccggcgattccagaagatcacggagcatgactgcactgttttctttgttcggtacttcaatccctactgccgcttttcccggaatcggagcctcaatacggatatctgccgctgcaagattcagtttgatatcatcggcaagacctacgatcttactgactttgactcccatttcaggctgtaattcatatcttgtaaccgaaggtccacagcttacattggtaatggtaacttttaccccaaagttctcgagtgtctgctgcagcttcatagcggtctctcttaaatgcgcatctgattctcctccgccgcgttttcctctctgaagcagagataacggcggatactgatactcttttttcggctttacagaatctgcggcaacgcttgcagcaacatctgctacttcatctgccattcctgccgcccccatcttcggattcttacgtcttgcaggtttttcctgtgtctttggatcattttcagattccggagtcttctgttccggttcattcgtcatgtcttcttttccataatctgccggctcaggatccgcacggtgtatgataaattccggtttctccggtccttttgctgtctttggatcgattggaagttctcttacttccggagatttcttagcgatagacgtatcgaaagatactccttccacatgcttgtctctccgcctgtgcatgccgctgtctgccgcagccgcagcacgttccttttcacgttgttcacgttgttccatgcgtttacgttttctgacttctgcatgctctttatgtctttttgcatcttcttttgcccttgcatatgctttatcactgccggccttcacaccttttaatgcagactttcctgtaatgatcaccagacagatgatcataaggatcactgtgacaacatatgttccggctacaccgattgccggcgttaatacagatgccagtccctttccgatctttccgccaagttcgtccacgagctgcagcaaaatttcagcaaggaacagcaaaagcactgcaattactgtcttcatgtaagcataccggttgcctttattagacacctgaaaagataccagaccaaacaaaacgaatggaatgatataggccacggccccaaatatctcccacaaaactccggatacggcatctcctaaaaatcctgcaacaccaaaattactgatcagaagaatgatactgaccgcaagtgttatccatatcaggatttcatccatcagaaaactattaccggactttgcggttctggtagatctggttgttttttttgtatttttctttgttgtttttttattagaagtcgacttttttgaagtcgtacctgttttttttctgttcgtcttactctttgtagacttcgccgtcatgaaaactcccccttatgatggcaatactaattataattatagcatttaggggaattgctgtcattacacattttcgttctttttttgatttctgtcactgatcatttcgtgcaatttattcaatgcatcacttaacccgcctacagcatcaatgagtccttctcttacagcatcctttccttccagaagtgtcccaacatctttgaccagctctgtagggtttaacattaactcttcgatccgctcctgcttcatagaagaatgttctgacaaaaatcttgtgatccggtcctgtgtacgtatcatgttatcgagactttgctgaactccgataaacatcccgttagaccgcaccggatgtatcaccattgttccgcttggcacgataaatgaatagtcggccgacactgccagtggtccgccgatcgaatgactgccgccaagcaccagggatactgtaggtttactcaaagaagcgatcatttctgcaatcgaaagtcccgcctctacatctcctccaagtgtattcagaagaatcagaagaccatcaatcttactgctgtcttcgacttcggccagcataggaagcagatgttcatactttgtggcctttgtattcccggataccgcttcatgtccttcaatttcacccactatcgtaagaagtttgattctgtggttgtcccggcttccttcaagattcgcactaccggtttcttttaattcttctgtcggctctgcacttttttctttttcttttttctcttcgctcataaaaacacctccatactttttattagtatggaggtgttgcatacattttattcatcccagttgtgatatacatcctgaacatcatcgtcatcatccagcatatccagcgtcttctggatattggcaatgtcttttgaatctgtcagttctacatatgtctgagggatcattgttacttctgcagataccatcgggattcctgcttcttccattgcaagacgtaccgcactgaaatcatcaggatctgtcagtacttcaaagctgtcttcttcttctacaaagtcctctgctcctgcatccagtacctgcatcatcagttcatctgcatcgccttcatattcttctttgtcaatcacgatctgcgtaattaagttgagtattccagataagccaaagagtccaaaacagttatattatagcggagaaagagaaaaatgagagaagaccaattcctgcggcagcgtctgcagaaagaaatcccgattgagatttcacctgttttaagagatttaataactgttatattttgttattaaattctccgcaaacccttgaaaatctttgtgtgaatcctctatttcggacaggagataatttgacaggaaatttcaaagaagagtataatacatattaaaacattttgaatcggcatgtgtccggaagaagctgtcactggcaggtcctctgtattataagcaggttctctgtattataagcaggttcgaaatagacgctatgggggaaaataatttggaaaaaaaactgacaataaatgatatagcccagatgtccggtgtggcaaaaagtactgtatcaagatatctgaacgggggaagcgtcaaagatgcaacggcccagaagataaaaaaaatcatcgaagaaaataattatgagccgaatctgtttgcaaggctgaatgcaaaagagagccggatcataggacttacggtacctggatttaactcggtaacaacaccgagacttgtagaagtaatcgttgcctatcttaagaaaaatgattatacacctcttatcatgcatacggaaaatgatatcgaagaagaaatacgctgtatcgaacggctgaagaatatgaatgtagatggaattatggttcttgcgacgggaagcacaaaagaatacgaagaagcagtaaagaagttaaaaattccaatcctgtttcttggacaacgcttcccgggagagaattctgtcattaatgatgattacaatgcaggatatgcggtgggtaattatatcggacaacgtaagttcaaggagatttatatgctctgggtacctgaagatgacccggcagtaggaggagaacgacgccatggagtgatcgatggacttatgtcctgtgagaaaaagccaaaagaagtcatagagacaacgttcttttatgaaaatgcaattgaaaatgtacagaaatttgtagatcatatgaagacaccggcggcagtcgtatgcgcaacagaccgtatcgcatttggcgtgtacaaagtaatgtcagagaaaggtatacggataccggaagaagtatccgtggtaggatttggcgattacgaagcaggagaactgttacagccgccacttacgacggtaaaatttgactggaagaactggggggagatcagtgctgagtcgatgatccagatgattttaggaaagccggtaagcccgcttcaggtcaacccgtatgaaattatagaaagaaaaagtgtaaaagagaactgagaatcaggcggatctgtcaatttgacagacccgcttttgtgcaatatagacaaatttagatatcaatttttggaaccgtttccgaaaatgaaattgcagtgacgttttgtgttgacatacaaaagctgatgtatataataaaaacataggaacggaaccggttccaaaacaaaacaatacaaggagaagagaaatgggaaagaacaatgagtatctggaaatatcaaaacagatcgtagccaatattggtggaatggataatatccagggaacagcacactgtgcaaccagactcaggatcgtattgaaagataatgatcttgcagatattgaaaaactggaagatatcgacaaagtaaaaggtgcgttcatagcaggtaatcagttacagctgatcctgggagctggaacagtgaatgatgtatatgaggtatttgccgagtatacgaatacacagaatatgtcactgggagatctgaaggaagaaagtgcgaagaggcagaatccacttcaggcagtgatcaaagcgttatctgatgtatttatcggaatcatgccggcacttcttgcagcagcccttctgatgggaattacaagcgtccttggcggacttgaagtagtaaagacacatgataccttatatgcgatcaaccggctggtaagtcttgcgtctacaggtatctttgcaatccttccaatggcagtatgctattcagccgtaaaaagatttggcgggaatccggttcttggtatggtaatcggagcaatcatgttagacagttctcttgccaatgcttaccaggctgcacagggaaccgttgatatagaagttatccgtctgttcggactgaagattgagatggtaggattccagggaggaatcatcatcgcgcttatgatgggatttgtagttgcaaaactggataaattcttcaataaggtaattccggatgtaatcaagcttctggttgcaccaatgctgacagtatttatctctacggtattactttttacacttgtaggtccggcaggacgaattctttctaatggaatcacagacggactgatgtggagtacagaacatctgggagcattcgggtatgcgttatttgccggagttcagcagatcgtagttatcacaggtcttcatcacattatcggtgcggtagaagcacagcttattgcatcgacaggaacaaactttttaaatccactgatgtctgtagctttatttggacaaagtggtgcggtacttggttatctttccctgaactggaagaacttaaaagccagagagctttgtattccaagtttctgctcgacattatttggtatcagtgaaccggcaatcttcggagtaaacttacgttacaagtttccactgatcggtggatgtatcggtggtgcagttgcaggtgcatatgtatactattcaaagcttactgctcttggattcggtacaactgcacttcctggaatggcaattgctaatccggcacatcacgggtacattaactacatcattgcacatgcaatcgcgattacgattggatttgtatgtacagtcatctttggaaaaatgtggtcagcaccggataagaataaaaatgacaaaaagaacgatacaaaagaaaatgatacaacaaaggcagttattacagaagagcctggtgcagtctatgcagcagcagagggaacagtaaaagatatcgaagcatcgacagatccgacatttgcaaacaaggtacttggagacggtgtcgttatctttccggaagacggaaccgttatggcaccatgtaaggcaaccgtatcactcgtatatccaaccggacatgcaatcggacttacaactgcagatggagcagagatcctgattcactgcggggtagataccgtcaatatgaacggtgaaggatttgagacacttgtaaaagaaggacaggaagtaacagcagaagaagcacttatcagatttgacatcgacctggtgaagaagcatggatactctccggagattcttgttatcttcacagagcttccggaaggaaagaccatcaaaacagaagaaaaacatattgcaaaaaatgataagatggctgaaatcgtgtaaggataaggtggacaggaacagatgaacaaagagacatatttaacagaatatccgaagcatgaaagtatgagggagaatgtaaaaaaagataagaacagacttcactttcatatgatgccgccgacaggctggatgaatgatccgaatggtctgtgtgaatttcagggtgtgaatcatatttatttccaatatacaccatttcttgccggatggggaacgaagctttggggacattacacaacaaaggattggattcattataaagaagaagagccgttcctttatccggacgaagaatgggacagagacggtgtatatagcggatcagcctatacctgtgaagatggaattcactatttttacacaggaaatgtaaaactctgggataaagattatgattatatcatgaatggacgggaacagaatacgattcacgtattcagtccggatggaaagaatattgcatacaagaagcttgtaatgaccaatgatgattatccggtgaatatgtccaagcatgtcagagatccaaaaatctataaaaaagacggccgttattatatgatccagggaggccgtgatgcggaatcttatggctgtgcacttttgttttgttccgacgatctggaacactggaaatggtacgatacggtgcggacagcaaagccgtttggttatatgtgggaatgcccggatctgttcgagattgacggccagcagattatgacatgctgtccacagggagtagatcagaagggatatgattaccagaatgtgtaccagtgtggatattttccggtagagtttgacctgaagaacaaatcatacagctttggaaaatttcaggaatttgacaaaggatttgacatctatgcgacacagacatttgcagatgaagcgggtagaagaatcctgattggctggatggggattccggatgcagattatgataatgatgcaacggttgcatatgactggatccatgcacttaccatgccaagagaactggaatggaaagatggaaagatcttacagcatccattaaaggagatgaaagatctgcgtaaaaatgcatttacctgcgagctggaagcatttacaaagtgggcgcctgcggactgctgttttgaactgagacttgacgtggaagaagcaaaaaatctggagcttaagcttcgtgaagatgttacaataagctggaaggacgggctttttaccttatcgatgggagaaagcggacgtggaagaaagcagcgctttgctaaggtggaagagctttcggatattaccatcttttcggatacatcagccattgagatattcattaataacggggaaacggttctgacaacaagagtatatagtgaacatcttgaacagaaagtagagcttgtatccagagaggtaaagggaagcgttcatggatatgaacttggatcattcgaggttgaatataaaaaatagattccggactgcataagatataacaggtgaatatacggaaaagaaaataaaaatgtggacaggttcctgaaaaaagaggtgccagtccacattttttataccatagtatgtaagagatgctgtcagtggcaagttttatgtattgccatgcatttgtaagaagtagcatgaatattacggtgcggcagagccgccagtccggtgtggcgagaaccacctgtccggactaacggagccacctcagtttgtttattaagttactttttcagacgattgtttttacggttgctatactcgacatcaacaagcataccgaagcgatcttcgaatggaacttccttcattgcaggatcatccatctggatgcggaatgcatctgccatagcagtcagacgcatttcaataagtttatcgattgtactttgatttgtcatgattgtttacctccatagtatttggctcctctggttatgccgtgtggtttttctacttgagatgattctgattcggtatcaggtacatcctttgttgcaaccaatagatttttgatacttaccattactatggaattacggacaatacagaaagtataacggcattccgatataacatcatgagaagcctgttctactgcctgaaccggagaagccagaagaaaagctataactgggtagaatttctaaatatgctggataacagctatccactggtaagaccccggatatatgtcaatatatacgaatgataatgtgaacgattcgtttcgcaaagagccggatgcgggaaagccgcacgtccggaattctgtgaggggtgtacgaccgtaaggggtgcacctactcgacctattaagaatcgagatcatcagaagtctttttgataaagagaaagcagatattccaatcgttgcaatgacagcaaatgcttttgagatgggaatgaacgatcatatagccaagccgatcgatgtagaaaaagtagaggaagtgctggttgcgcttttgaaagagtaagttttgcaaaaaagaagatcatttacatgtcgagaaccggatgacctacttataggaaatgtcaataaatagacgttacgtattttttttaacaattggacttttcgtatcggaagaattaaaatgatacacgagtaggaatgttggtatctgtgagtagaatgggtgtagaaagatgatcaagacagatgcaaagacgatattagcagactctattaaagaattattgaaagaaaggtcttttttaaatatcggcgtgcaggatattgtaaagaactgtgatgtttcaaggactgcattttataatcattttaaagataagtatgatctggttagctggatatatcggagggatgttgaagatatatactggaaactaaagaaatttgactggagaaaatatcatacaaagattttgcaatatatgcagggagagagggagttctatgtaaatgttgcagcctatgaagggcagaacagtattttagattatataacttcttatgcgatcatatgtatggaaatgcaggtaaaagaggagatgggaatgaatattctcccggaagacgttgaactttctatctatatgtggaatctggcgagtacacgcctgacttttacgtggctcaaggaaaaggatgaacgaaaaccggaggagattacagatcttatatgtaactgtgtacctgaaccaatcaaaatatattatcaataggttgtggtgaaaataccataactttttattatactcttttttaccggaataaaagatttacaaaaaatgtaaaatgtaaacttgctttacaatgggtgcaaaatgtaaattttatttacaaggaattcacactataatttttagtgcgtaaaacgcaaatactcattattaaggtaagtttcaaaccaaggaggagcagttatgaaaaagagaatcttagcggttcttctggcaacggctatggtagccagtttggcagtaggatgtggtaagagcaatgacacaacaaagactgagacaaaaacagaaaacacaaaaaaaggaaccggtgacggtacatttacgatggcaattgactatatgccggacagtttaaaaccaaacggtgcgggaacagattcgtttaccacaatgattcgtccactttacagttcacttttttatcagacagattcaggaatggaatattatttggcagataagctggatgtttccgatgatggattgaaatatacagtacatttgaatgataaggcaacatggagcgacggagagccgatcacggctgatgatattcaattccgaattgattattctatggccagcagtggacgctcaagccttgcaacagtaaatggtcaggaggttaagctgaataaaattgatgataagacggttgaatttgtacttcctatgccgtatgcaaactttaaaaatactttaggtgatacagttttactgccgggacatgcattcaattgggatccttctaaagtagatgacagcggatatttctggaatacagatatggcgacatcgggaccttatgtagtgtctgagatcaacgacgacagtctggtatatacggccagaaatgactattttggaggaaagccaaatgttaagaagattgttcttcggaccttaggatcaggcagttctaaacaggtcgcatttgaaaatggagagctttcttacatgcgtgtaacgacggcggatgagttggaaaaatatgaaaagaatgataattacaatgtaacttctatatcagaagcaagattaaactatctgcagctcaatccgggtggaacttttgcaaatcttccagcagaggcaagagaggctattatgattgcgttaaatgatcaggaaattattgatgctgcttacggcagtgacaagcttgctaccagagcaaacagtgtacttacaccggatcagtcattatataataaaaaggtaccaggatattcacagaatcttaaaaaagcaaaagaacttgcaaaatcttcgggccttgcaggaaagactttgaaatacatctataatgcggatcgtgcaaatatggaagcagttgcaactgttgtacagcagcagcttgcggcaattgatgtaaaactggatgttcagggacttgattctcctacattcttctcaattttctttgcgccttatagtggaaagacaaccgacgagtatgatattggatcaaatggctgggattccgagcgtggagattgcggctggcaggcttctacttatatgaagaataccggatggggatggagcgaagatatgacaaaacttgttaaccaggcagacagtgcaaccacccagaaagaagctcagaaattatggaatgaaattcagaaaaaatatacagatgaatgttgggtatatccacttacatatacaaattatgtaatggtttctcagaagaatgtaactggattagacggctcaaaagtagttccggaatttgtagattggatgtcaattaaagtaaaataaaatctggcataaagagggggtcttcggttgaggaaggcacccttcttttatttggagaggaaagaatatgtggaaatactgtggtaaaaaaattatagaaacattaattataatgcttttgatttctttcttttcttttgcgattatctatattgcaccgggagatatttcaagtatgtatatcacatcggatatgagcgaaaaagaaagagaagctgttctggaaaaactaggtgcaaatcaatctttaccggagcaatatgcaggatggatggggaatgcactgcacggggatctgggagtatcgctgtcaaataagtcgtcagttgctccacagttagcacgaagattgccgactacgatcttattgatggggtgttcattgatactgtcattgttaattgcaattccattgggtctctgggcgggatataaaaagaatggaatagtggacaatcttattagttttttgtcgtacattggaatgtctattccgtctttttggttaggaatgctattgatcattttatttacggctgagcttgggattctgccatccggtggcatacatacagttggtaatgaatcagtgaccgatacaataaaacatctgataatgccaagtattacattaagtcttgggtctgtagctacgtttatccggtatatccgggcaaatacgatcagccagcttgcagaggagtatgtgttgactgcggaggcaaaaggaacgagtgctttcaacattttacgaaaacacgttttaaaaaatacattgcttccgatcattacacttatgggaatgaaccttgcttcgctagtctgcggatcattcattattgaaagcgtatttggatggccgggaattggaatgtttgcaatgagtgcgattggtcagcgtgattatccggtcatcatggcttatattatgctttcagggttcattcttgttagtggaaatttgttggcagatatattatatgcatttgctgatccaagaattaaacgggggatagataaagcgaatggaaaataagattattattcaggaaaattcttttcagagactggaacataaagagccggaaaaggtaaaaaaatatgaacatagtatgtggaaggatataaagagcgaattgttatcaaacaaagttgcgttaatcagtctgattatgttggcaatcattatgattgcggttcttctggcaccgctcagtccgtatgatccgtataaaattgatgtaagtcaaaagttacagggaatttcggcaaaacactggtttgggacagatgattatggcagagattatttcacacgtgccttatatggaggaagagtttcattgttggttggcttctgttctatgctgatgacgatagcgattggaacaactataggagtattttcaggctatataggtggaaaattagatgtattgctgatgaggcttacagacattattcttgcgctgccgagcatgttgttaatggtagttatgaatgtctttttacaaccgggacttatgacactgatcattgtcctgagtttattttcatgggcatcggttgcaagaattacaagagcagagacgatgtctgtgaaagaacgggattacgtaagtgcggtaagaaatctgggggccggaaatgtgagaattgcttttaagcatattgttccgaatattttgggttcggttattgtagcggcaagcttaggagttgccaatgctattttgatggagtcatcgctaagctttttgggactgggtgtacagattccggttgcctcctggggaagtatgctgcaaggggcacaggcccatattctggatactccgcgtttagccgtttttccgggactactgatcctgataactgtgttaagttttaatttgttgggagatgtgctcagaaccacattggagccgaagatttcagagtaggagggaagcagatggaaaatttagtagaggtaaagaatttggctgtttcttattttacctatgcaggagaagtacagtcggtacgtggtgtgacgtttgatatcaaaagtggaaaaaccacagcaatcgtaggtgaatccggatgcggaaaaactgtgacggcaaaggctttaatgggactgattcacaggccgggcaaggtcttggaggaaagtcagattctctttaagggaaaagatatcataaacttatcaaagaaagaaaaaaatgaattctgcgggaaagaatgttcgatgatttttcaggatgcgttggtgtcgttaaatccaacgatgaaaatcggaaaacagattacagaaaatctgacaaatcataataaatcgattccaaagaaggaattaaaaagaaaagcgacagagatgctgcaactggtagaaatcccggatgcggaaaaatgtctggaaaaatatccacatgaactttccggaggtatgcgtcagaggattatgattgcgatggcgctggtaacgcatccgaatcttttgattgcagatgaaccgactacagcactggatgtgacgattcaggcacagatcatttctcttatgaaagagctgcaaaagaagatgggaatgtcaattgttctgatcacgcatgatcttggtgttgttgcagatatcgcagacgaaattgttgtcatgtatgccggaaagattgtggaaaagggaaaatgcagagatattttctatcgccgcaggcatccgtatacatgggcacttttaaaatctgttcctcgggtggattatgaaaagaagcagccacttgtaacgatagaaggaggcatcccggatatgacaaatccaccaaaggggtgtgcgttttgtcagagatgtccttatgcgatgaatatctgcagtgaatatgaaccgacaaagacaacattggccgatggacatgaggtctggtgctggctgttagataagagggctgatttaagtaaagtaccggaggagataaggaggcgaaaggatgagtaatgaagaaaaacgtactgttgaaatggaagtcagccatttaaaaaaatattataaagcaggatggcacagtgtgttgaaggctgtggatgacgtctcttttcgaatctataaaggcgaaacattggggctggtaggagaatcgggatgtggaaagacgacttgtggaaagacctgcattggaatgctggataaaacagatgggcaggttctgtatcagggaaaggacgttcattctatgtcaaagaaagaacattttacctttacgaaaaaggttcagatgatttttcaggatccgtatgcgtctctgaaccctcatgagaaagtgtatgatattattgccgagggcattcagattcataaacttgcgaaaaatagggaagaagaaggaaagatggtatatgaactcttggagatggttggacttaatgcggaacatgcggccagaaatgtgcatgaattttccggaggacagagacaaagaatcggtattgcaagagcactttccgtaaatccggaattcctgttttgcgatgaaccaatttcggcactggacgtttccatacaggcgcaaattgtgaatctgcttatgaagttacagaaagaacgcaacctgacgatgttatttattgcacatgatctttcggtagtaaaatacatatcggaccgtatcggtgttatgtatctgggaaaaatagtcgaactggcggattcatcgaatctgtatatgagtcccaaacatccttatactagagcacttttgtcggctgttccgattgcagatccggatgtatctgcaaagaaagagcacattatgttaaaaggtgatgttccaagtgcggttaatccaccgaccggttgtcgatttgccgggagatgtaaggaatgtatggaaatctgtcgcaaagttgaaccgcatatgacagagatcgaaaccggacattatgtggcgtgtcatctttatgattagggaggaaaagtaagaatgaaatacgattttacaacaattatggaccgagtgggaaaagatgcgattgcagtggatgttgcaaatatggggaacgcatttggaccaagggatgaggcatttgattttattccgatgtggattgcggatatgaattttgggaccgttccgactgtgcaggaagcaatcggtgaaagacttgctcatccggcatatggatattttatgacgagagaggaatattatcagggaatcattaactggcagaaaaagagaaatgctgtggaaggacttacaaaagaagcaatcggttatgagaatggtgtacttggtggtctggtatcggctcttaatgcatttgcaaatccgggcgacagtattttggtgcatagtccgacgtatatcggatttacaggaagtatcacaggtgccggatataaaatagttttaagtgagctgaagcaggatgaagcgggcatctggaggatggattatgaggatatggatgccaagattaaaaagaataaaattcatgttgctgttttttgcagtcctcacaatccgacaggaagagtctgggagagagaagaacttgaaaaggcaatggaagtatataaaaataatgattgcgttgtaatcagtgatgaaatttggtcagatattatcttaaatggaaataagcatatacctctgcagtctgttaacgaggatgcaaaaaatcggaccatagcactttatgctccgagtaaaacgttcaatctggcagggctgatcggaagttatcatattatttataattcatatctgcgtgatcgggttcgctccagcagtagcaaatcgcattacaattcgatgaatgttctttctatgtatgcactgatcggagcatataaagaagaaggtatggaatgggttgatgagttacgtgaagtgttatcgggaaatataaattatgcatgtgattttataaaaacacgttttgaaggagtaaatctcagtaagccagagggaacatatatgctatttcttgattgcaaggagtggtgtgagaaaaacagaaagacaatagatgcactgttaaaatcaggtcaccgtgtgggggttggctggcagaatggaagaccgtttcatggagaatattctatccgtatgaatcttgctcttccgttctcaagggtagaggaagcctttgagagattggaaaaatatgtattttaaaaatagaacataatggaaatagagtatgtggggaaacctgtatactctatatttttatgtgaatatgtctactgccagtggataaaattgacagagaaattgacagagattataataaaaacagttaattcttgaaaggaagtattatgaatagcagaaaaatagtactgtggcagttgtttttttcaacattatatttaagtgcatttacattcggcggcggttacgtgatcgtgagcctgatgaagaagaaatttgtagatgagcttcactgggtcgaagaaaaggaaatgctggatctggttgcgattgcacagtcttcacccggggcaatcgcgataaatggagcaattgttgtaggatataagcttgcaggaattgctggtgtactggtatcgatcatcggaacagtcattccgccatttgtcattatagcgttactttctgtctgttataatgcgtttcgcactaatgaactggtaagtcagatgttggaaggcatgcaggcgggagtcggagcggtgatcgcgtcagtaacctatgagatgggcgcgggcatagtgaaagaaaaggacggaatctcgctgctgatcatggcaggtgcatttgtggcatcctgtgtatttgaggtaaatgttgtgtatattgtgatcatatgtggattgttgggtgtcttacgcacatgtatgagcaggaaaggagcaggcaaatgatatatctgcagcttttcttaagttttttacaggttgggatgttcagctttggtggtggctatgcggcgatgcctctgatacagggacaggttgtgacgggacatcattggcttagtatgtcagaatttacggatcttattacaatctctcagatgacaccgggaccgatcgcagtgaattcagcaacctttgtcggaatcaagattgcagggataccgggtgctctggcggcaacatttggatgcattctgccctcgtgtattatcgtaactgtcattgcaaaactctatttaaaatatcgcagcatggaggtactgcaaggtgtgctggggtctttaagacctgcagttgtggcgatgatcgcggcggcaggaatctcaatcctgatctcggcattctggggaagcaggaatctgatcgcacttgcagggacgaagtggagtctggtagtgatttttgtagtttgtatgatattacttcggaaagtgaaaatgaatccaatatgggtgatggttctggccggagtgatgaaagtgggaatatcactcatttgaaattgaataaaggggaaattacatagagaaaaaacaaaaaatgtggaaaatgcaggagagggacaaaaaaatggggaaaaaaacaattgagaaaaatgcgatcacggaaggagttatctggaaacaactgttgatcttcttcttcccgatcatgcttgggacgttgatccagcagttatatacaactgtggatacgatcattgtaggacgcttcgtgggaaaagcggcacttgccagtgtcggaggaccggcagccgtcttatcaacaattgttgttacattctttaatgggctggcgaacggggcagcagttattatcgcacaatattatggtgcaaaggacagaaagagtctgcatgtgggactacatacggcatatttgttctctattgtgatcagtctgatcgtatcgctggttggtacagtgctgacaccgtggttgcttacaattatgaatacaccgcaggatatgatggcagattccacaatctatctcagaatttattttatgggaattctgttcacactggtttacaatatgggagcagcaatcatgagagcggtcggtgattccagaagaccacttttgtatctgctggtctgttgtgtgatgaacatcatcctggatatcgttatggtggtaggaatgaagatgggaattgccggagctgcacttgcaactgtgatttcgcagtgtgtcagtgcaattctggttacatggtcgctgaccagggcatatgatgctatgaaattaaagttccgggagcttcggatggatgccagagtattgaaaaaagaattgaagatcggtgttccgggagcgcttcaggcatgtgcatacggtgtgacgaatgtggtgatccaggcatcggtcaacagctttggtacgaataccgctgctggatgggcagcttatggaaagcttgacttgatcttctggacggtatcgagtgcgcttggagcagcagtgacgacatttgccggacagaattacggagcaggaaagatggacagggtatataagagcatccgggtgaatgtggtgatctcttatatatttacgggagcgattattgtaatactttttgtattctgcgagccattatatcatatgttcacgacagatccgaaagttattgagatcggagtatatatgttgcgcttcctgataccgagttatctgttaagtgtactacttgaaaatctgtcgggaggcctgcgcgggctgggagatgtattctggccgacgatatttacgtttggaggattgttctttgtaagacttccgtggatcatgattcttacgaagatccatcatgaggtggaagttctgctgatcagctatccgcttgcatggggagggacactgttgtgtctgatcccgtattatttctggcgaaagaaaaagagaatgaaactggcaggaagatagagacaaaaaagagcttgtgaaaaaacagataaatgttttatcacaggctctttttatcgccatgcgttcgtaaggagctgccagtggcaggccctgtagattgccatatgtccggaaaaagctgccggtatattagtaatttccaagtttattcagatatttatcaatgatattcagccttttttcaatcccttttgctctgtggctgatgatttcaagcagagcctctgttacaaactgtggtccgatcatagaattgaaaaatgtattactgtctacaggtactgtaagaagtatgtcggcatatttcgcaagaagagaacttggtttgtccgtaatgactataatagaggcaccggcgtcatgtgccatctctgcagttacttcatcctgcgaagaataacgaggaaaactgaacagtaccagacaatctgtatgtgagatgttacacatatggtcgattggactcatagaagtggtggttgtcatagtcacatgcggaaccatctgcttcagatacaggagaaagaaatccgcaagacagatattgcctcttgttgctgcaatatatttgtgcttgctggagacaatgagatcagcagcctgctcaaatgtctcgatagaattctgaataaagatttcttccaggttatgtgcggcattcttaaaatgccggttgatataatcagaagaggtgtctaatttggcctgctttgcgatacgctgggatgggaccgtaatactgctggaaatgctgagtaccttatcctgataatctttacgcaatgctttctgaaaatccataaagccgtcaaatccgatcgtacggctgaaacggatcacggaagattcacttactccaagttttaatgcgatctccgttgatgtcataaaacaggcttccgaagcattatccagaacatattctgcaatgatcttttgtgtcttggtaagatgtgcagaatgaagcaattccttcatatctttcataatatagttcctccgaaagtaatattgataattagatttaaacatgaatctgcaaaagttgcaagacagagaacgtggaaaagggaaaaatcactcggaagtgcgaaaaaagaggcaaaaacttatagataatgataattttttgtcgttatttatatatcatgtaaatgaagcatgctccaatctttttgagtctaaatcgtcaaaaacataaaaaatattgtgcataatgcataaaaagatatgtgaaaataataacatatatgtaaaatgtgcaaaaataattatatacaaaaaaacaaaggtatgctattatcaaggcatcgaacgacgaaagagaggaaaagaaatgttacaaacaattgaaaacgtgaatgcggccgttaacaatttcgtctggggggttccggcaatggtctgtatcatcggtgtagggcttgtactttcagctcgtacaggatttatacagttccgaaaatttgggtatgccattaagaattctatcggacgtatcttcacaaagtcagaagcgaaagaaggtagtatcactccattccaggcagtgtgtacggcgcttgcggcaacggtaggaacgggaaatattgccggagttgccggtgcgattgcaatcggaggagcaggagcagtgttctggatgtgggtgtccgcattgcttggaatgtgtacgaagttctcagaagttacacttgcggttcattacagagagaagaatgcagagggagattatgttgggggcccgatgtattatatcaagaacggtcttggcaagaaatggtactggatggcttcggtctatgcgatccttggaagtttgacagtactcggaacaggaaatgcaacacaggtaaataccattacgacatccatcgattcagcacttataagctacaatgtgattgatgacgcacagataagtatggtgaatctggtgatcggaattgtgattgcagcactggtagcggttgttttacttggtggagtaaaacgtatcggtaccgtaacagagaagctggttccattcatggcagtattctatatcatccttgcaatcggagtagttgtactgaatgcagacaaagttccacatgtatttgagatgatctttgtaggagcatttaacccgtccgcatttaccggcggtgtggttggaagcatgtttatgactatgagacgtggtgtttccagaggtatcttctcgaatgaggccggaattggtaccggatcgatcgcacatgcatgtgcagatacagatgaacctgtaaaacagggaatgttcggaatctttgaagtatttgctgacacgatcgtgatctgtacactgacagcactggttatcctttgtggaggcgaaggaatccagtacggcgtggcagcaggtgcggagcttaccatctcaggattcgtaacaacatatggaagctgggtgacgatctttactgcaattgcaatgtgctgtttcgcattctcaacgattcttggatggggactttacggagcaagatgtgtcgagtttgtatttacaacaaaggttgtgaaaccatttatgatcgtgtatgcgttggtcgcaatccttggtgcaacagtggatcttggtatcatctggggaattgcagatacctgtaatggtctgatgtctatccctaacttgatcgcattattcctgttgtcaggaacagtggcaaaactggtaaaagattactttgcaaaacaagagaaaaagaattagaaagacaaaaaaataacttactagtgaaaaaaataacttttattgcattgataattgtgttgtgttagtatgagttcaggaagagatgaagaatattcttcaacaaaatgaagttaagaaaaataatcttcattcagaaaagtaaacggattaaaattttaggaggtttttcaaaatgaaagtaggatgtgtaaaagagattaaaaacaacgagttccgtgtaggtatgacacctgataacgttaagagttatgtaaatgcaggacacgatgtttatatcgaaaaaggtgctggcgaaggttcaggattcttagatgccgaatatgaggcagctggggctaagatgattgatacagcaaaagaagtgtgggatacagttgagatgatgatcaaagtaaaagagccgcttccggaagaatatccattattccacgaaggattgatcctttatacatatctccatcttgcagctgataagccgcagacagacgcgctccttggagcaaaggtaaaaggtgttgcttatgagacactgatcgaaagaaacggaagcattcctctgcttgctccaatgagtcagatcgcaggacgtctgagtattcaggaaggtgcaaaataccttgaaaagagattcggtggagaaggcgttctcttagcaggagttcctggaacaccaaaggctaacatcgtaatcctcggcggcggatctgtaggaacaaacgcttgcaagatcgcagttggaatgggagctaacgtaacaatcatggatatcaaccttcagagacttgcttatctggatgatatcttcggagcacgtattcagacacttgtttctaacgatgcaaatattgaaaaagctgtaaaagaagcagacctcgtaatcggatgcgttctgattccaggaaaatcagctcctaagatcttcaagaaaaaatatctgaaagagatgaaaccaggcgctgtatttgtagacgttgccgttgaccagggcggatgtggtgagacaacaaaggttacataccatgatgatccaatctttattgaagacggtgttgttcattactgtgtaggcaatatgccgggagcagttccaagaacatctacaatcgcacttacaaatgcaacattatcctatggactgcagattgcaggaaagggactggagcaggcttgcaaagataacgaagttatctactctgcaatcaatacatatgatggaaaattaacatgtaagaacgtagcagacagctttgactgttatgaatacacagatatcaaatctgtttgttaatcaaatcgttattatacattataataagaagaaactaaaactaaatcgtcatgcgttcgaaagaagctgattaattcctatgagtggaaaaatgccggtatcttggggggtaccggcattctgtgaatatatctgtccggtcggaacactggagggaggaatcccgatcctttccacacatccggaactgcgccgtgtgatcgggacattattttccgtgaaaatggtaatcctggtgatcacactggtgggatgtttgagtatctgcaggtttttctgcaaagtgatgtgtccgctgggagcaatctatggacttttgaataaagtcagcctttttcatatggatgtgaatatgggaaaatgtatacattgtggtaaatgtacgcatgtctgcccgatggatgtggatccggtaaagacaccggattctgcggaatgtatccgttgtggaaaatgtgtgagtgcgtgtccgaaaaaggcgttgaaacttggaatgagataaaaacattcgtcaaattgtacaaaatagatgaaaaaatcaaaaaatacttgaaaaaaatacataaaatcctataatgaaggtaggttaaggaaatgttaagaaatgaaagacattggaggtgttggtatgattagttttatcatttgcttggcgctacttataggagggtattttgtctatggtaaagtggttgagaacacttttgcaccggatgacagagagacaccggcggttcggatcaatgacggtgtcgattatgtggtaatgccacagtggaaattgttcctggtacagctgctgaatattgctggtctgggaccaatcttcggagctatgcagggagcattgtggggaccggttgtattcctgtggattacattcggtacgatttttgcaggtggtgtacatgactatttttcaggtatgctttctgaaagaaatgacggagcatctatttccgaagtgtgcggaatttatcttggaaatgtaatgaagaatgtgatgcgtgtattcagcgttgtacttctggtcatggttggtacggtatttgcagtaggaccggcggggctgatcgttacattgcttggcaataaaggcgtgacgggagccttggctaacccggaagtatggctttggatcatccttgcatattactttgttgcaacatttatttcaatcgataagatcatcggacgtatctatccattgttcggtatctgtctgatcgttatggcagtcggtgttatctttggtatctttatgaatccgaattatacgattcctgagatctggacgcattttaccaatatgcatccggcgggaaagccaatctggagcttcatgttcattaccgtagcatgtggagctatttctggattccattctacacagtcaccactgatggcacgttgtatgaagtctgagaaacagggacatttcgtattctatggtgcgatggttgcagaaggtgtgatcgcactgatctgggcagcagcaggatgttctatttataaaatcacaggtggtctgagtacaggtctgaatgatattcttgcaaatggtcagtcatcagcaatctatgatgtatgtattaagactatgggcggtgtcggggttgcacttgcaatgatcggagttatcgtatgcccgatcacttccggagatactgcattccgtagtgcccgtctggtactggcagactggttcaaagttgatcagaataagatgcagaaacgtctgatgttatgtgttccgcttctggcagtcggagcatttgtcggacatctggattatgcaatcgtatggagatacttcagctggacaaaccagacacttgctatgatcgttctgtggacagcaagtatgtatctgttccgcgagaagaagaattactggatcacagcggtaccggcaacattcatgagtgcagtttccatgacatatttcttctgtgcagaagagtgtctgggactttctacgaaggttgcttatccggtaggaattattctggcagcagcattccttggaatctttatccatgctacaaagaaaccaatgaaagcatagttgtaagacagcgtaatttgaatacataaaaaggcagaatgaattgacagaaatgagatgatgaaaagatgaaaccacgaagactgggtaatgtatcgattccggatgaagaattgataaaagacagaaaagaatgtaagaagatcggaccttgtggcattggaaaaaaggcggtgtatcttagcagtttctatattgacagaaggtattacataccgatcagttctgtaaaaaggatcttcaaaagaatcgccatgagtaagggtggatttacaggaaaaggagtattcggtacattatcctatcttgtggtcgtatatgaggacggaaaagaaaagcaatgcaatttcaaacatgaagaagatgtggacagatttcttgcgtacatagaagaagaatatccggatattccggtacacagtcttgaggctgagagaaagctggcagagaaggaaagatggctggcagaaaagcaaagagaaagaaatgtatcggaagaaacaaaaagatgtctcgtgaagctggagcaggcagaacagtatctgaaaaagcaatcggatatctatatggacttgagtcagtcggcgaagaaaaagcgtacttatgacagaagtaacccggcgtataaatgggtagctcttgcaatcgtactgatgggcggtgcggcgttcgtctatggtatctatgcattgacgacccatgcaggatttggaatgtatttccttttgtttggtctggctgcaatcttcttatttgccggagcgaatgtacttccgacttcgaagaataataagaattatattgagaagcggctgacggaatcgatcagtcagatggaagagtatatcagagtgtatccggattttccggtaccggctcactatgcacatccgattgtgctaaagagaatgcaggaaattatgaaagaagggcgtgcgagaaatattccggaagcattgcaggttttgaaaaaagatctgaaagcgttgaattccagcgtagtcgtcgagaaagaagagtatgacgaagtggtagcgatcaaaccgatgtttctggtgatggattataaataatttggcagatagaaaatgcggtcggcatatattctgagattatgagtaagaatatattgccggccgtatttttgacatatcaaagtatacaagagaagataccagcgggaggttctttgtagcgctatgtgtttgaaagaagccaccggtggcgggtacttagattttaagcttcaatatatatgctaaaaccaggaatagtattgcgatacatttcacaccaatagacactccgacataccccggcagcaaatatcctttttgctttttgcctaatattaaagaaatgatatcgattataaaaaagacgattagaacaattgcagcaccgaagatcagtagcatagcatcaccattattatgtgtcagtgcagttacgactccaacatttgtaattgacatccagctgtagattatgtatatcatgcatattaagttaaaaataatatcaaagacaactttttcgtttcttgttccgttcttcattttaatgtcccctttctttaagagaatttggtaatagccggcattcttatcaattttttgtttcttctcttttgttgtctataatataaaccatcaagtaacttgaaggtcaatagttttagaaaaaataatttgtaactgcttctgtattgtggaaaaatcagaatattggtataatgagaacatacattcgaagtagaaaaactttgtgaatgaatttgtgagtaaaggaaggaggagaacaggcatggcagacaaaggacggagaagctatatcgcaatcgacctgaaatcattttacgcatcggtagaatgcaaagaaagagaactggatccgatgacgaccaatctggtagtagcggacaaaagccgtacggaaaagactatctgtctggcagtgtctccttccttgaaatcctacgggataccgggccgtgccagactcttcgaggtcgtgcagaaggtaaaagaagtgaataaaagacggatctgcatggcacccggaaagaagtttgcaggaacttccgtagataatgaagaaataaaactacatccggaattggaactggattatattacggcggttccgagaatggcattatatatgaaatgcagtacggagatctacaacatttatctgaaatacgttgcaccggaggatatccatgtctattccattgacgaggtattcatggatgtgaccgattacctgaatacttaccggatgacggcaagagagctggctggaaagattattcgggagatccagcaggagacgtcgattgcggcaacggccggaatcggaacgaatctgtacctgtgtaaagttgccatggatattgtggcgaagcatatcgagccggatcagaatggggtgaggatcgcagaacttacagaaatttcttataggaagcttttgtgggcgcaccagccgatcacggatttctggcgtgtgggcccggggtatgcgaagaagcttgcggaagtcggattatttaccatgggagatgtggcaagatgttctcttggtaagccgggggaatattataatgaagatttgctgtaccggctatttggggtgaatgcagaacttctgattgaccatgcatggggatgggagccatgcacgatcgcagatgtgaaggcgtataagcccgaaaataacagtatgggtgcgggacaggtactgcattgtccatataatttcgagcagacgaagatcgtggtaaaggaaatgatcgatcagctggcattggatctggtagataaacgtctcgtaacggatcagatcgttctgacgattggatacgacatcaagaatctggaacaaggaacgaagaaaaatgtaggggagatcacgacagactggtacggcaggaagctgccgaaacatgcacacggaaccgctaatctgaagcagcatacttcttcatcgaggctgatgacacaggcaggtgtaaagctgtatcatgaaattgtgaatccggatcttctgatccgccggattacgatggcagcgaatcatgtgatcagtgagaaagaggtccaggaagaacagcagtatgaacagatgaatctttttacagattttggaattgcaaagaaggaaaaagaagagaagaatgagaagctggaacgggaaaagaagatgcagaaggcgatgctggatatcaagaaaaaatatgggaagaatgcaatcttaaaaggaatgaatctgcaggaggatggaactgcgatggaacggaaccggcagatcggaggacataaagcgtgagaaatgaaaatgtttcgaaagaaaatatttcaacaaaacagattctgcaagaaagagaatcggtaaaaaatatttctaaggaaaacaggatagaattttctgggaaattgcagaaatcggtactggaagtacagcggaaatatggtgatattctgggctttccgcatcatgtatcagagacacatccgccgatgccgacagcagatcgggcggctcagtttacaccatttgcggccctgaacggatataaggaagcaatcgaagagacagagcggatagcagaggaaaaagtcgagcgggaatacgaataaagacaaaaaatagaagaaatggaaaaaaatatggtgaatctcttgaccttcaagcggcttgaaggaatataatcaccttaacaaaaagagagaaggatacagatatccgaaacaggggaaggtgagagtatggaagatacgggaaaacttgaagaaagaaataaaattgtttctgagcttcagacaataataaaagaacggattgaattaaaagaaattgaaataccgggaaccattacatttcaggttatgtctgtggatggtgggaatgtaccggtgggagccggtgaagtgcttctgcttcgttacagtgcgactcatctggaatacagtcatgagttggaagatgagaaccagaaatttcatatggcgcttcatatcatttattgtaaagagcagaaaggtttgtttggaaaagtaaagtacaagacgataaaacaccgcaaagaaatcattacagaagcagactggaaaaatggaaagaaggtgtcactttatgaagattaaagatgtagaaaaacaggttggcatttccaaggcgaatataagattctatgaagaagaaggactgatccatccggcacgtaatcaggaaaataattaccgggagtattcagaagcagatgtagaacagctccaggaaattaaaaagttgcgtctgatcggtattccggtacaggagattaaagaaatctatgaagacagactgaccttgcaggaagctttatcccgtagactggacgagatcgaaaaagaagaacgtacattaaaggaaacgaaactgacctgccagaaagcactgaaaagtaagcttgatattacatcgatcgatcannnnnnnnnnnnnnnnnnnnnnnnnnnnnnnnnnnnnnnnnnnnnnnnnnnnnnnnnnnnnnnnnnnnnnnnnnnnnnnnnnnnnnnnnnnnnnnnnnnnnnnnnnnnnnnnnnnnnnnnnnnnnnnnnnnnnnnnnnnnnnnnnnnnnnnnnnnnnnnnnnnnnnnnacaatgagattgcatgcttttttattgcaggaacgatcttaagtgtgatatctatatggctgcttccgaaggattatatcggaacacatctttatgtcgggctgatttcacttgcagctgtggtaggtctgctgatcataggaacatgttcggcgaatatgaaagtgcatctgacattgttgcttctgggggcagttgtacagcctgtcggactttttacaatcggaacagtgatgggaagaggatatattgtgtgtcgtgatacagcggtattgaagcagtatgtaatctacctgtatggcggggcatttattcttgcaattatattgtggatgggctcaaagctgaaccgctatattctgaacaaactctggatcagtatgcttgcaagcctgatcatggcaggagtgatagcacagatgctgaatcagaagtatggacacttgatggcaacaggcgaacttatcgtgggatttttgtgtgctgttatttatcttgctgctgtatccggaacatggacactggcgaatgcagactggggaaaatataaccggtatcatgcagtgtatacgtcgaacaagatgatcaatgtattcgcaacgatattcaatgcagccggatactatagtggaaagaactggaggagatagcagatatgaattatattacatttaatgaaattattgaagtgaacggattgctggaggagaaaggactgaattttaaagtccacttaagagatgcctgtgggaagcagtcatgttggatcgaaccgttgggaaattgtgcatgcgaaggacggtatgaggagatgtatcaggttgtggaggagtattttagaaggaaagggcagaagattacgtttgatgagacgaagttgaatttttttgctgtttaatttatctgaaaaaatatattgaataatatttacttgtatgttaatctatataaaagcatacttcaaaagaaatctaaggtatattgaatcatataccatctacattctaattacatttcagaaatctatgctttttataccaatcaattgtaaaaagcaggagaggactgaacgtgtaagtaagatatcctcctgcacataggaggaattaaatatggcgagaagaaagagtcagaagagacgcaacaaaaagtatcaggtaaacaaccgtcagttaaagtcaaaacggccatacaaagatacgatttttcgaatgttgtatcatgataaagaaaatctgctatcattgtataatgcagtgaatggtcggaattatactaatgcagaagatttgcagattgtcacattaaaaaatgcaatttatatgggaatgaaaaatgatctggcatttattatggatatgaatttatatttgtatgagcaccagtcgacgtataacccgaatattccgcttagaaatttattctatattgcggatgaatatcaaagattagtagttcagaaatctttatattcaacggtaatacaaaagataccgataccaagatttattgtgttttataatgggacgaaaaaggtagacgattataatgaattccgattatcttcagcttatgagaacccgacggataatccgaatctggaattaagggtgactatgttgaatgtaaatgatggtcataatctagaactgatggaacactgcagaacattaaaggaatatgctaaatatgttgcgagggtaagaaaatatgtgacgcagaatattcctctggaagaagcagttacgcgagcggtagatgaatgcatagaggaaggaattctggcagaatttttgatgaagaataaggctgaggtgatcaaagtgagcatctatgagtatgataaagaatttgaagagaaaaaattacggaaagcggagtatgaggctggggtagaagctggaattgaacttggagaacggagtcttctggaaaatcagattagaaagaagttgaaaaaaggaaagcctatagaacaaattgcggatgaattggaggaagcggtaactacaattcaacgaattatagaagaaacaaaaaaagaaaattgagcaaaatcaggaaggctgttgcagatgcaatagtcttcttttaaaagtaataaatggatttattacttccacggttgctttctcgtaaaatataagttaaatttataataaataaaattttacagagagaatgaggaaatgtcatggaaagcaacaaagaagaacagataacgacggtcagtgaagagaatatttataagctgaacggcagggttccacttagaaaagccattccgtttggcttacagcatgtactggcgatgttcgtatcgaatctggctccggtactgatcgtgtgtagtgcggcagtacttagaagtaatggggcgcatttaagttcggcggagattacacagttattgcagtgtgcgatgtttgtagccggaatcggaacctgtttacagttatatccgattggagtgatcggatcaggacttccgattattatgggagtcagttttacgtttcttggaagtctgttggtaattgcaacgaatccgaatcttggatatgaaggtatggttggtgcagttattctgggtggtatttttgaaggttttgttggactgagtgccaagtactggagaaaatatctgactccggttgtatcggcttgtgtagttatcgcgattggattatcacttctgccggtaggtatggattcctggggcggcggaagtggagtgaaagacttcggttcctggtatcatctggtcgttggagcatttacattgatcgtatgtctggtatccagagaagtactgaaaggcgtatataagaatttaaatgtgctggtcggactggtatttggctatgcacttgcaattatatttactgtagcgggaatcgcaccgatggttgacttttccggtattcataagacgattcaggaggttggtgtgttcagtatcccgaagcttgtgttcctgaccagtcataagccggtattcaatctgggagcattttttacgatcgcaatcgtattcctggtatcggcagcagagacgacaggtgcaacgacggcagtctgtacgggagcacttggacgtgatcttaaggtgaaagaacttcgcggttcactggcagttgatggattttcaagtgcaatctccggatgtttcggatgtctgccgctgacatcattcagtcagaatatcggacttgtgacgatgacacaggtgatcaaccgttttacgattctgatgggagcactgattctgatacttgcatctttattcccgccgcttggagcattcttcaattcacttccacaggcggtgcttggcggatgtacagttatgatgtttggatcgatcatgtatgaaggaatcaagatgctgaaagaatgtaaattcgatgacagaacaatgattatcgtgtcactgtcatttagtatcggagttggtctgacacagacatccgggaacttctttacagcatttccaagtgcggtaggagatgtgtttaatggaaatgcagtggcaggagtgtttgtggtatcgttacttttgagtctgtttttgccgaagaagacgaaagtggagtaagcgagaatataaaacagcatagtgaatcatagaagaaaagattatctggggaaagggaactatccggataatctttttttggggccatgcgtttataagtagttgccgaaagaagattctttagagttaaaaatataagaaaagttggaaaaatcacataattacgaaaaaaacggttggaatattgcgtggtaaaaattattgacaaacgataattccttgctataataaaattataaattatcgaaaaacaataatttccaaacacagaaaggaggaaatatgggaattcgtatatgcttggatgaagtcctgaaaaagaagggaatgacttcaaaagaattatgcagacaagtcggtattaccgaggccaatctgtcggtactccgaagcggaaaagccaaaggtatccgtttgcatacgatgaatcgtatctgttatttccttcaatgtgatgtaggtgatattttaaaatttgatggaaatctggatgaagaggagggtgaataatatgaagatgaaaagttttgaaaaattccggaaaccactgaccagtctgatgagatttctggaaatcttacattggttcgatggtatcgtattactttgggcgggatcggctatacctatgcacagcgtgcacattaacggggctatattcggcatcaaacaggataccatgatgaatgcctacgggatgttctttacactgattgatgcaaagggaaatatgcggatgcatctggtatccgtgtggcttctgctgttgggagcaacatctatattactggccctgatttttcgcaacgttcataaaatactgaagtcactggaaggcacaaaggaacaaccagaaatgggcacaacgtttacagcagaaaatgtagaaagagtaaagaaaataggaatttacagtatagtaatgccgacgattcagaatgtggtcgtttatatttgcggagtattgattaaaatgaatggactgaaagatatcaattttgaagtgagaggattcatttttggaattattgttttatgtttagcctatgtattctcttatggagtaaatctgcaggaagaagtagatgggtttatctaagatttctatttggagaggagagatggatatgcagaaaagtatcaaatcattgaaaagaaatggcatattgttattggcgtatgatttattggtgttatgtattgtatttgtaaaaaatggaatgataaatatgtcagcggaagcggccacttctctaattgtatctattggttttggaatattcatcaatttactctggatcgtggattccaaaacttggattactgattacggaaaaaggaaatgtatctggtcctattggtgtggcgaaattgtacttctgctgttagtagttgctttggaaaatatgaatcaactggttgcaacatctgccatattaggaatgatggcggtatatcttataattggtatatggtgggtgagccgcaagctctaatgtgctaatgctcaccacacacatccagaaattcctgcaccagcggcaccggtttctttcccttcgcccagatcagaagtatcttagttataagatccggctcatccaattcttgtatacaaagtccgtcacacaagctggccatggactgcggaaagatggcagttgcaagatcttctttcgcccacagcatggcacctctgggatcatcgcagacacagaagatgtccggattcatattctgggcatgaaaggtattcatgatgagttcttcgtatctccggtataagatcagcggtctatgtaaaagatcggagagctttaaggaagaaaccgcattgtgtttcgaagaattatgcggtgtatctgtggtaacgtcagcggtctttgaaaccatatttttgggtgctgatactgcaatcatcggctcagaacacaattccatataagacacctcgtcaagacgcagtggtgttctggcaacggagatatcgatgatcccgtccagaagatactgataaagcgaataagtgatcccgtcgtggacttcaaagttcacgtcgggattttttttcgaaaactgggaaatataaggcatgatggtatctacagttgtgggagtcagaccgatacgcaggatccgttttttcccggttttcgagacctcgagctcagtagatctggcgtattccagcagattaccggatcggtcgtagagaagctttccggcttcagtaagagtaacgcccttgctggtgcggtcgaaaagttttacatttaattcattttccagctgacggatctggtagctgagcggaggctgggacatatttaagtgtcttgcagcttcgttgatgctgccggtggatgcgatctcgcggaaatattctaactgtctgagttccatgttggattacctgccttatatgttttttgtattgcaaagctataaaaacaatattattcatatcaatgataacggactataataaaacagtcaagggatattataataagtagatagcgatgacttattagttatcggaaaaaggaatggagtgaaagaaatgaagcgtcttgagaagtttctgagaccttaccgcagagagagtattctggcaccgctattcaaattattggaagtcgtgttcgaccttatggttcctgttgtggtagctcagattattgatgtgggcgttgcgaagaatgaccatggatatattgtggaaatgtttttcgtgttactgctcatggcagcagtcggactgttgtgcagttttaccgcacagttctttgccgcaaaggcaagtgttggatttgcgaccagcgtcagacaggcaatgttcgaccatatccagggattgtcatttacagaactggatacgctcggaacagacacactgatcacgagactgacggacgatgtgaaccaggtgcagaacggaattaacatgggactgcgtctgttacttagaagtccgtttgtcgtaatcggtgcgatggtgatggcatttaccatcaatgtgcgctgtgcactgatctttgtagtgacagtaccgatcctgtttgtcgttgtattttcgattatgctgatcagtattccgctgttcaagaaagtacaggcaggtctggactgtgtgacaggacttacgagagagaatctgacaggtgttcgtgtcatccgtgcattctgcagggaagaacagtcggtggaagaattcgaagaaggaaacagagaacttacaagattgaatgagttcgtaggaagaatttctgcccttttgaatccgctcacgtatgtattgattaacggagcaactgtgttactgatcgcacgtgccggagtgcaggtcaatatcgggaatctgcagcagggacaggtagtagcgctgtataactatatggcacagattatcgtagaactgatcaagctggcatccctgatcattacgttgaacaaatcaatggcttgcgcagaccgtgtgtccggtattctggatgtgaagtccagcatggaatacaaagtggcggctgagcagatgaagaatgaacagataaatgttgatcaaagaaaatatgggacagacggcgagaatgaacaggccgacagtaatctggcagttgaattcaaccacgtcaccttcacatacgaaggtgccggagcatccagcttatcggacatcaccttccgtgcgaagaaaggacagacgatcggaatcatcggaggaaccggaagtggtaagagtacactggtcagcctgatcccgagattctatgatccacaggaaggaacggtaaaagtaaatggtatcaatgcaaaggactatccgcagggagaactttgcagtgagatcggagtggtacagcaacgttccatcctgttcaaaggaagtatccgcgataatctgaagtggggcaatgatcaggcttcagatgaagatctgtggaaagcaatcacaatcgctcaggcaaaagatattgtagaagctaagcttggaaagcttgattctgaagtagaacagaacggacgtaacctgtccggcggacagaagcagcgtctgacgatcgcacgtgcactggtcagcaagcctgagatattgattctggacgacagcttaagtgcgctggattttgcgacagacgcagcgcttcgtaaagcaatcggtgaactggaaggcaatgtgacaaccttcctggtatctcagagaatttccggtatccgtcaggcagacaagatcctggttatggaggacggtgagctggcaggacagggaacccatgaagaactgatggagacttgcgagacctatcaggagatctattattcacagttcccggaagaacgtccggctgcagttaaatcttcaaaggaaaccggaaaagatttggacaaagcggataaaatgacagagaaagcagagaaaggagcggcagagtaatgaagaaattattaaagctcataggaaagtataagattttccttgtattcagtgtaatctttgctgcaatctctgtagtattgcagttatatgtgccggttttattcggtgatgcaattgatgaagttgtatcggcacatcaggtgaactttgatatgatgtggtattatctgaagcagattctgatttttatcgtgatatcagcatttgctacgtggttcatgaatctgttgaacaaccggatgacttaccggatcgtgcaggatatccgttcacaggcaatccgtcatatccaggtactgccgttgtcttatctggatcagcacagcaccggagatattgtaagccgtgtcattgcagatacagatatcttatccgatggtctgttgttgggatttacacagttgttttcaggaatcgtgacgattgttgtgacactgattttcatgttctctaagaatgtgtgggtaacactgctggtgatcgtactgacaccatttagtttcgtagtggcgaaattcatttcttccagatcttatacgatgttccggaagcagagtgagaccagaggacggcagaccgcactgattgaagaaatgatcggcggacagaaagtagtaaaagcatttgggtacgagaaagaatcatccagaagatttgatgagattaataaagaactgcagaactacagccagaaagcagtgttctacagcagtttaacgaacccgtccacacgattcgtcaataatatcatttacgccggagtggctttacttggagcatttctgataccgggcggcacgttgacggtcggaggactttctgtactgttagcgtatgcgaaccagtatatgaagccgttcaacgatatcagttcggtagtcacagagatgcagaatgcgctggcatgtgcggaccgtatctttgatctgttagagcagaaagaagagacattggatgcggaaggagcatttgctacagttgatggcaatgttacaatcgacgatgtggcatttagttatgataaagaaaaagaactgatcgagaacttcaatctggatgtaaaaccgggtatgcgtattgcaatcgttggtccgacaggatgcggtaagacgacatttatcaacctgctgatgcgtttctatgatgtagatgaaggaaagatcctggtggatggaaaggacatccgggaggtatccagacatgcccttagaagcagctttggtatggtgttgcaggatacctggatcaagagcggaaccgtaagagacaacatctgctttggaaaaccggatgcaaccgatgaagagatcattcgtgcagcgaaggaagcaagaagctgggaattcatccggagacttccaaaaggtctggacacggtgcttcacgaagacagtatcagccagggtcagaagcagcttctgtgtatcacaagagtcatgctctgtctgccgccgatgttgattcttgatgaggcgacatcaagtatcgatacccgtaccgaactgcaggtacaggaagcattcgataagctgatgaaaggaagaacaagctttatcgtggcacacagactttcgacgatacggaatgcttcgttaatcttagttatgaaagacggtaagatcatcgagcagggcaatcatgaagaattgctgaaaaaaggtggattttaccataagttataccatagtcagtttgaaggttaatacgcaatctggcaaaaagctcgcttaggcgggctttttcagttataatacagataaatactaatcagtaagaatggagaaaatctgtagaaggaatgtgctataatattctgcagtgaagaagaacagagggagtaacagtatatgacgatcaaagaaattgccaaactggcaggagtatccagcgcagcggtgtcgagatacctgaacggcggatacgtcagtgacgagaagaaagaacagattaagaaagtaattgatgagaccggctatcagccatcggcgcaggcgcgtatgcttagaaccaagaaagcgtgtctgatcggggtggttgtaccaaagattaattcagaatccatcagccggatcacggcaggaatcgaaaaggttctttcggagcggaattaccagatgctgcttgccggaacggataatacaccggcgaaggaaatagagtatatgcgtctgttcgagaattatccggtagacgggattattcttgtgggaacgatgatcacggcggaacaccggagatttctgaaagaatcgaaagtaccggtggttgtgattggtcagcatacgaaatatgcgaactgtatttatcatgatgattacggcgcaggggaggccatgggatgtgcggttgcggcaaagagccggaaagagattgcatatatcggagtatcaagagaagataaagcagctggagcggccagagaagatggattccgggaaggtctgaaaaggtcgggaaaagaattaaaagacggatattataaggtggcggagttcacgacagaatccggatatgaaaaggttctggaattattgaatgaaaaacatgacatcgatatcatatcatgcgccactgatacaatcgcagccggggcaatcgaagcgattcatacttatgccggaagtcagattccgaagaatgtagaagacacaggatccagattccgttatatattagaaaatacatcgattcaggttaccggatttggcgataatcagcttttaaaggcggtaacaggtggaataccaacagtgcattttggctataagaccagtggaatccggggcgcagaactcctgttggatgtaatagaaagggatgaaagcattccggtagagatcaaacttggattccggctcgctaacattgatgatccggaagaaaatatagaagactaagagatgccggagcagaaaatcagtgtgtaaaatgtgtaaatagattccgaatcagtcaaaaacaacagaattcgtgcaaaccgcacaaaatcgaatagcaaatatcagtaaaagtgccatctttacaaatggcattttttttcttattataaaatcacaagatgtgaaaacgattacacataaagcaaggaaggagagttaatatggattacagaaagaccgcacaggacatcctggatcatgtcggcggaagtaagaacattgcatctgcagcacattgtgcaacgagacttcgtcttgtcattgcagataataagaaagtaagtaaagaagcacttgaaaatgtagatggggtaaaaggagtcttcgaggcatcgggacagcttcagattatcctcggaaccggtacggtaaataaagtatttgctgagttcatcgacatcgcaggtatcacggcaagctcgaaagcagaggcaaaagaggcagctgcagagaagcagaactggttcatgcgtgcgatcaagctgcttggtgatatcttcgtaccgatcattccggccatcgtagccagcggtttcttaatgggaatcatgaactcacttgattttatgaatagcaacggattcctccatattaatacacacagttcgatttatgtatttgcgaatctgttcagtaacattgcttacacattcctgcagatcctgatcgcattctcagctgcaaaagcattcggtgcgaaccagtatcttggtgcagttatcggtatgatcatgatccatccgtcactgcagaatgcttatactgtagcaacagagggtgtacagcagacacagagcgtcttcttcggactgttcaagatcgatatggtcggatatcagggacacgtcattccggttatcatcgccgtatggattctggcagtgatcgagaagaagttacataagatcgttccggaagttcttgacttgttcgtaacacctctggtcagcgtatttgtaacaggttaccttacattatcaattgtaggaccgatcttcgtatgggctgaaaatgcaattctcggagcaatccagtggatgctaacgcttcctctcggaatcggaagcctgatcatgggaggtttatatgcaccaaccgtagtaaccggtattcatcagatgtatacagccattgacatcggacagcttgcaaaatacggtgttacatactggcttccacttgcaagtgcagccaacgtagcacagggagctgcagcacttgcagtaggtattaagtctaaagataagaagatcaaatctctggcgcttccatcatcactcagtgcatttatgggaattacagagcctgcaatcttcggtgtaaacttaagattcttcaaaccattcatcgccggatgtatcggtggaggatgtggagcattatatgcatcactggtacatcttggagcgaaaggaactggtgtaacaggtatcttcggtatcctgctctgcctgaatcagccgcttcagtacctgatcgagatggtgatcgcagtcggtgttgcattcgtgatctcattcctgatctataaggatgcagaaccaaaggcagcaacagagacagcagcagtagaaaatattgaaacagcagacgcagtaacaacagacgcaacaacagcagacacaacagcagagacagcagaagagacattaacaagtccggtaaacggaacacagattccattatccgaagtagcagatgagacatttgcatccgagatgcttggaacaaccgttgcggtagagcctgcagatggcaagattgtagctccatgtgacggagaagtttccaatatttttgaaacaggccatgctgtatgtatcacaacagagtccggcggtgaactcttgatccatatcggtatcgatactgtgaagatggatggaaaaggatttacaaagaaagtttctgatggcgacaaagtacatgcaggagatattctggtagaagcggaccttgaggaaatcaagaatgcaggatatcagacgacaacaatgatgattctgacaaatacagatgaattcggaaatgtaacaaaggcagaacctgctgaagttaagacaacaagtaaagttatgacacttacaaaataatgtgtatagaaataatgcttatagatagatggagacgattgatttatgaacgcattaacaagagatcttgtaaaattagtagagacagcagaacaaagccagaaaaccagagaagagttatccgtatcagatagaaaattccgtgaaaaactacacctgatgccgccggtcggctggctgaatgatccaaatggactctgccagttccagggtatctatcacgcgtttttccagtattcgccgtttaatgcagaaggcggtgtgaagatgtggggtcactataccagcaaggatatgattaagtgggaatatcagggtaccgcactttatccagatcagccatttgactgtcacggagtatattccggatccgcatttattgaagatggaaaaatgtatctgtactatacaggaaatgttaaattagaagacggggaatatgattacatccgcaccggacgtgagggcaataccgttctggttataacggaagacggcaagacgttcggaaagaaaaaagaactgatgagaaattcagattatccggacgatctgacctgtcatgtaagagatccaaaggtatggaaagaaaatggtacttattatatggtacagggtgcaagaacgaacgaagatgtaggtcaggtacttgtatttgaatctgaagataaagtaaactggaagttcagaaaccgggtggaatccgaaaagccattcgggtatatgtgggaatgcccggattatttcaaaatcggagataagaaacttctttccacgtctgttcagggactggaagggggtatctgggaggatcgtaatgtatatcagtccggatactttgagatagaaggagatattcttggagaatacaagttgtcagagtatcatttgtgggattatgggtttgattattatgccccgcagagttttgagacggaagacggaagaagaatccacatcagctggatgggaatgccggactgcgaagaatacagcaatccgaccattcagacaggatggcagcattgctttacatttccaagagaaatctttgaaaaagacggtaagatctgtcaacgtccgataagagaactagaagagaagaaacatctggtaagtgatgtgaaaggtatgctggcaggagagggatatccggtatatgaaatgacgatttcggatattacaaagaaccgctttaaagttatcctttcagagaagctgatcctggattatgctgacggaaaattccggatgcattttacagatcaggataaaacttcggtatcttccggaagaagcatgagatatgtagaagtggaagaagtggagaatctgaagattctggccgatacatcctctgttgaagtatttgtaaatgatggggaatatgtattttcgacaagatattatccggaagtttataaattacaggcagaagctgtgggagcacagattacgttgtcagaaattatgtaacgaaatatcaatctgagataccaataataaagaagatcaccatatatcaaaagaaagagtttcagtagagaaattttcaaaagatatatggtgatttttaataccaatgtatgcaatagaagctgccagtggcaggttctatgtatgcaagagatacaaatatttttcaaaattaacgccttcgtttaccggaacatgttcttttacagaatcaattaatgatttttcaagaaaagaacctgcggtctgcatcatttccgtaagggaaatatctctggcaagtccgcctgtgatgcaggaagcaaagagatcacccgtaccggaataacttccgttgcaacagggatatgccgaaagaaaatgtgaagagccatctagcaggagatttccaatcttatgaactccgtcatctgcagtaaaatgaataccagtgacgaggacctttttttcatgatcctttgtcaaagtctgccctgcatccttaaatcgtgaaatgagctgctgtatagacagagacggatcctgcaggctgttataatctatatccgtcagcagacagaattcggtaaggttaggagtgataacatctgcacgtgcgacaagttctttcatagcagtcagaagcccggaagtatacatatcataggtaacgccatcgtctcccattacaggatcgaccagaagaaaggtgtctgctgtctggaaagtatccagaaagtgcatgatctgttcaatttggcagacactggcaacataaccggtatagattccggaaaaagaagtgcctagtttcttccattcctggcggaaataatccatcttatcggtaaaatcataacagtagtagctggggtattctgtttgtgaacttaaaatggcggtagggagtggacaggcctggattcccatcgcagataatacggagatggcagcagtcagggaacagcgtccaagtccggacagatcattgattacagcaactttttttgtcataaagaaatcctcattttctaatgtattgtaaatatgtaataattataccattataaaaagaagaaagaaacggccagagaaaaggaagacttgcaggccaccagagcttaaaaaataatttaaaaaaatttgaaaaagttgttgacagatagaaaacgttgcgctataattaatttcgttgctgaggtacataaataactgaggcaaacaaatataatatgtgcgcgtagctcagctggatagagcgtctggctacggaccagaaggtcgggagttcgaatcttctcgcgcacgtacgagagacccttgtttgacattaagtcggacgagggttttttgctgttccgaagcggatgtttcaattcagatgaccgggacagtattgacataatttgggcaactgtgttaaggttacatagtaaatttaatcaagattgtgtgaggtgtcagtcagaaggattcagaataatttgtggaaagaatgatctgactggtgaaaagggaaacaggtgagaatcctgtacgaactcgtcaccgtgttttgcaagcagaagctacagatccactgggagaaccgggaagggagcagatgtgtcagagcaataagccgggagacctgcctttcgcagtacaggaacgaaaaagttcaggccacgaggaattggcagtacgaaatggatcacagaactgtatgtggtataatacagttttattttcgttgtcttcgttttctgacggaggctttttttggctatatgttcggaaggagctgacggaggccgagtttttttgtatctcgtgcattgacaatcggaaaatcaggaggtaaaagaaatgaaaaagaaactggtagttgtattattatcagcagctatgtgtgtagcagcacttggcggatgtggttccaaagcaggtagcagttcagacagcagcaagaagactgcagagaattcatcaaaagaggacgatcagaaagccgcagatgaagtagcaaagaagattgatgccatctatgtgcaggaaagaaacgacaagacagatgagcagtgtaaagaagcgaaagaagcgtgggacaaattgacagatgcacagaaagaacttgtggaaggtgaaaatgctgatccggattatttcggaagagatacaggggatgcttcccaggatgatccgttaaatgaagataacatcggggagaaggaactcttggtagtaagtttcggaacatcttttaatgcaagccgtgcagccgatatcagcggagttgaaaaagcacttcaggcagctaatccggactggtccgtaagaagagcatttacagcacagatcatcattaatcatgtacaggcaagagatggtgagaagattgataacatggatcaggctttagagcgtgcagtaaagaatggtgtaaagaaactggttgtacagcctacacatctgatgcacggtgcagagtatgatgagttaacagaaacagtaaatagttacaaagataaattcgaatctgttaaaatcgcagaaccacttctcggagaagttggagcggacgcaacagcaatcaatgaagacaaggctgcagtagctaaggcaatcactgcagaagcagtaaagacagcagaatatgacagccttgatgcagcagcagaggacagcacagcatttgtattcatgggacatggaacatctcatacagcaaagatcagctattctcagatgcaggcacagatggaacagcttggatataagaatgtattcatcggaacagtagaaggtgagccggaagatacttcctgcgaatccgttatcgcaaaagtaaaagatgccggatataagaatgtaatccttcgtccacttatggttgttgccggagatcatgctaataatgatatggccggagatgatgatgattcatggaagagtcagtttgaggcatctaagaactttgacagtgtaaagacacagattgcaggtcttggagagatcgatgcaatccagcagttatatgttgctcatacaaaagcagctatggatgcacagtaagaaagataattaagggagataacaatgttgagaaagagattgatggcagttgtactgtctgcagtaatgacagctgcaatattcacaggatgtgcaagtaaggatgacagcagcaaatcagacaacaaatcagccaagacagaacagcagaagtctgatgcaaaagaagaaaaatcaaaagattcaaagtccgaagcagcaaaggcgccgatcgaggatgggacctatactgcagaatttaagacggacagtacgatgtttcatgtaaatgaagcaaatgaaggaaaaggtacactgactgtagaagatggaaagatgacgatacatatcagtctcgtatcaaaaaatatcgtgaatctcttccctggtacagcaaaagaggctcagaaaaaaggtgcaaaacttttagaaccaaccacagacaaagttacatacagcgatggaacgacagaagaagtctatggatttgatgttccggttccggcgttagatgaagaatttgatctggcgttgatcggaacaaagggcaaatggtatgatcacaaggtaagtgtatcaaacccggtaaaagctgaataaaatgtatgaataaaaactcttatttcccatatattgtacagactacaaaaaggtggggaataagagttttttttgtatcaaacaatgcaaagatacataaaaatagtaaaaatgcataaaaaaaacaagaattactggacttttatgttaaaatgcactaatattgaattaacggtaaaacggaataaaaaacaggaaggaaataagcgaatgaaaggaaatgtaattgtaggacaatctgggggaccaactgcagcgatcaatgccagtcttgccggtgtataccggacagcgaaagaccgtggagccaataaagtatatggaatgcttcacggaatccagggattattaaaagaaaaatatattgatctgtcagatcatatcaagaccgaactggatgcggaattattaaaaagaacaccggccgcatttttgggatcctgccgttataagcttccggagatccatgagaacagagaagtgtatgataagatatttgagatcctggacaaactggatatcgaagtatttatctatatcggtggaaatgattctatggatacaatcaagaaattatcggattatgccattatattcggtcatgcaatccgcttcattggatgtccgaagacgattgataatgaccttgcacttaccgatcatacaccaggatatggaagtgcggcaaaatatatcggaacatctatgaaagagattatccgtgacagcttctgcctggaatatgaaaaaggcgtggtatctatcgtcgaaataatgggaagaaatgccggatggctgaccggagcggctgcattgtcaaagggggaagactgcgaaggaccggatcttatctatctgccggaacttccatttgatcttcagttatttggagaaaagatcaaacaattattacaggagaaaacatctattgttgttgcagtatcagaaggaatccgtacagaagatggaacttatgtatgtgaacttggcaacagtattgactttgtagatgcatttggacataagcagttatccggaacagcatcttaccttgcaagttatattgcaggggagattggatgtaagacacgtgcgattgaattaagtacattacaaagagccgcatctcacgcagcctcaagagttgatatactggaagcatatcaggttggaggagcagcggtaaaggcagcagacgaaggagataccggaaagatggtagtcttaaaacgtctgtcggatgatccatatcagtgcggaacagaagtaaaggatgtacacaagattgccaatgatgagaagcttgtaccaagaaactgggtaaacgaagaaggtacttatgtaacaaatgagtttatttcttatgtgcgtccattgattcagggggatgtatcaccggttatggtagatggaatcccaagacatttgtatacaccaaaagaattaagccacagataaaaaatagataagatttgaaggttggaaagatagtgccgtattgcgagcgtataacaagatacatgtcttgcaatatggcactttttgtataccaaagcagcatgtaagagaagttgccggtagcaagttctgtagatacaaaaatatgtaagagaagttgtctgtggcaggtcctttaaagtgctgtgccagaaaatatataaaaacaataaaaaagggttgaaattttgaaatgaatcaggtaagatatctttaatctatattttcaagatagattcttttaattaatctatatagtctgtaggacttcgtgaggcctcaccaaatttaccatgtaagaaaaaatgaaaaaagaacaggggtgatatatgttgcaacaaaaagaaagttatgatgtgttgcggctgattgagcatggacaattatgctatatcagttccgaaaatgtgcaggggaaaaccctggacagatacttaaaatatcatccggtaataaaaaaacgggagatatttttattattaaaagagatagcaggacaactggcgtcatttcacaggtgcaggggaaatccttgttatcaatatgtaaatccatatagtattgtcaggtctgaagatggaagaatttattttctggatatgcagtcggaagcaaacagaagcaagatgatatttatgcaaagaagagatatccgtgaatattttcttccgccggacgaaaagtattatcaacatgccagtaaggaactggatatgtatgggctgggaaaaacatttcaatatattctggcatctgtggaggcagaaccacgttttaacagacgagaagaatatcgtcttcagagaattatttcaaaagcaatggggataagatcaacccattatctaaatgtatcagaaatccaaaaacaaatcccaaggtatgaagaaaaagatagagataaaattttgaataataaggggaaaagaagaaaaaaagtgtgtataacagtagttttgtctattgttttcgggggatatttgttcataaatgcatgggaaaatgctgaaaaagcaaaccagagagagatgaaaagaacggaatcttccaaatcagaagagaaaaaaagtgaaaaatcggatgaccggataaaaaagaaaatatatgaaagagatgaagagtatctggaattggcactggcatatttcctgaatgtgggagatatgaaaaaaagtctgaaatgtctgaatcaaatggagaatcagacgctggcagttaatctgaaaaggcttatcaaagcgtatgaaaaacaaaaagtgccggaagaggcagaaaaatttgcagcaagtcttgcttacctggagaatgaatggaaagaaagaagtatgcagtcggaagagaagaaaaaacaggcaatacagtgcctgataagagggtatggattactggatgataaagaaagttcagaaaaagtgttgaatctggtagaagaaggattaaagacagattatctgaatgattctgcgaagagagaactattgcagtatcaggcgtctgcattggaaaaagaagaaaagaaagaggaggcagcaaacatatatgcagagatattggaggatgagacggaaccgggtaagagagaagagctgtataaaaagatggtacagttgtatgaaactgcaggaagacgggatatggcaagcgatacatgcattcaggggataaaagagcttggagaatcagaagagttgaaattaacacatataagactgatatgtgcagatccggctgtcaatagagatacgtgtgcactcaagattaaagaatatgtaacagaagatactgaacttttgaaaaatgcagaatttaagaaattacaaaaagaatatggaattaaggcagaaggaggaaatatatgggtaggaagataaaaaaagtaataatgatagcagcatttggtatggtgaccggaggacagattgcagatctgttaccggaaggaaatgtgatgcaggtagaagcgggaagtcgaaagcagattataaaagtaaaaaataaaggaaaagacagtaagaaagaatttgacaaggacaaagacaacgccaaagataatgaaaaggatctgatagaagagggagaaaaagaggacagaaaagattcggaggaagatagagagaaagacgataagaaagatgacgggaaagctccggagaagggtgatgaaaaagatgacgggaaagactcggagaaggatgacgagaaagaggatggaaaagatccggagaaggatgacgagaaagaggatgggaaagactcggagaaagatgacgagaaagatgacgggaaagacttagagaaagacgatgaaaaagagaatggaaaagatccggaggaagaagagataaaaatgtatcatgcggaatatgaggatccggatggtcagaatggctattatatcagtgctccgaccggaaagatcacacatctgagtaagaatggcgtgaccagatacctttttgagaatggaaatggggaaaggcaggaaggtacgctggaaaaattaaatgaatcctgccggttgaaacaattgaattttgcagatggaaggaatgaactggaagtatggatggaagatgaagaacatcatcagattgaaaattcagaaagcagaaaggaattctggatagacagtgtaagaccggtgatcggtctggaagtgtccggaggagcagatatttggcacaaagaggcagcagaggtagtggtagaagcttctgacgggagcaatggaagccagatcgcggaaattatctgtaaaacaggagaaaaaatagttgggaaaagcagtaaaggagcagaaaaatttgtcattacagaaagttcacagaatggggaaagtaccccggtaacaattattgctacagactatgcgggaaatcagacggtggtaacggatcgggtttttgttgacagagatgcaccgaaagcattgatacaaggagtggaggattatacgattaccagtaaacctgtacaagtcagctatctggcagaagaagagaatgtaattcagacggtgcgggcaaatattttaaaagaagatatcgatgggaaaaaggaagaaacagaaatcacagaatggaaaacaaaaagcaggaatgagtctggtgatacaaaaaaagaaagtgtgcagacacttgcagaggacgggctgtataaactccgaatgaatgtaacagatatggcagggaatgtcagtcatgccgagagacagctgattatagataaagaaaatcccgttattgcacatgtagatgagttggatggaaagtatttaaagaagtttagctggaattattctatcgaggaatcgattaaggattttacgaattatacatatgtaatgaaagtggacgatgcattttaccggccaggagaaaagattgaaaaagaaggggtacatgtactgacaattgaagcttttgattcagcaggaaataaaggagaagcaaaagcgagatttaccatcgatcatacaccgccggtgatcgagtttgaggggatagaagatggagaaaaatatgaaaaagaaaaaacattttatgtcagaacagagaatctggaagatcagattgaatacattaaaattaatgggaaaaaacaaaacaggaaaaaacagaagaagggatatgaaattcagctaaatgaggcaaaaaattatgaaatagaggtaaaagcaaaagattttgcgggaaatgaaaaagtttcacagataggatttgaaatatacgaggaaaagagtttgtggcagaaaattgtggaaccggtcagaaaatatattttttatggaaatgaaaaggtaatacaggatgaaaaaatggtcaaggaagataaaaaggaaggaaaaaagaagaacataattttgtgggagagagctgttttatttggcgcattgattgttgtaggaatatggaaacgggaaaaagtgaaagaaatctggaaaaatctttcataaaagggaggatgccgggtaaccactttcgcagttcccggcatgtattatgaaaaagtttattccaaatagtatttacatactagataacgtcttttgtatatcaaaggatatgagagaaattctaaatcgccatgtgttcggaagtagctaccaagttctctgtatttctttgatgattatagtataagaaagacctatgaagaaagaatgttaaagtaatgaaagaattttgaaggataaatgaacaaattgtgaacacgggattttacaaagattttgttggaaaatagcgaaaaatagattatactaatagaagtcaaattgtagaaagaggagaaaatgaagaatgaaatatatttcttttgccattccgtgttataattcacaggattatatggcccatgcgatagaaagtattcttccgggtggagaagatattgaaataattatcgtaaatgacggatcaaaggacagaacatcagagattgctcatgaatatatggaaaaataccctactattattaaagtagtagacaaggaaaatggtggacatggagatgctgtaaactcagggctgatgcatgcaaccggtaaatattttaaggttgtagacagtgatgactgggtggacgaagatgcacttcataaaatattagatgttttacgccatatggaagaagatggaatggaactggatatgttgatcgctaactatgtgtatgaaaaagttggtgcaacacataagaaggtgattcattatcgtaacgtattgccacaggatgagattttccgttgggatgatatgggacatttccgtctggatcagtatattctgatgcactcggttatttaccgtacagacatgttaaaactgatccaacttcatctgccaaagcatacattctatgtggacaatatttatgtatattacccactcccgcatgtacgcaaaatttactatatggatgtagacttctatagatattttattggaagagaagatcagtcggttaatgagaaagtaatgatcaaaaggctggatcagcagatttttgtcacaaagacgatgattgatatgtatcagcttaaagatattggaagtaagaaattaagacagtacatgcttaattatcttgcaatcatgatgacagtttcttctattctttgcatccgttccaagaataaagaaaatctggaaaagaaaaaggaattatggcagtatctgaagaaaaaagatatgcgaagctttatcagaatccgttacggtattctcggacagacaatgaacattccgggaaaatcaggacgtaagatatcgtcactggtttatattgttgcgcggagattgattggatttaattaatttctatttagttcatcatcgtggcttaccccggtccatgagaaagacttggtatcctgttgcgggctaagattccacgatgaagaagttgtaagggcgtcagaattttctaaaagcacccggcctatgtgccaaactcgccgttcggctcaaacagtggcacatattccgggtaacgaaaattctggcgctctaacaacttctaatcatcgatccatatacgcccgcaacaggataccaagtctttctcatgtcgtgattggccaatgataatgaattcaatagagggactgtaacctttatgtgtaatcggaaatttgtagtgaatgccttaattttccgacttttccgatagatacacttccggtagcacagtggttacaattcccggtatttaattattatggcatgcgaaaacgtgactgaataaaagtatgggagtgatttctgtgcatatgaggtcatggttagtaactcttgagtaataaaattggccgttagccttggaaaaatcattgtctgagacgaatgttgagttttgatttttccaaggctggttttaggacaattttgttgctctagagttactccatgatcgaatcagcacagaaatcactcccatacttttattcgggacttgggtaagacgacatgatgaactaaatagaaatctctcctaaaataattctcaacagtgctttatccaacataatcgtccggttccaaggattgatgatgataccctgaatgttatcagctgtaatggcggaattaaataactgtttcatatcagtaagaaatgtagacattacgcttccggaacctttgagttcttcatcgaagctggtaaatgccgcccaccatttgcggccgtcatcggtctggattgcctgtacttggaggccggaggcagcggaagagggatctactgcaatgatcagttcgccatgttcattcatgcgtctgcggatgaccgtcagaacgtgagctagcatttcctgagacggctcatgttgaagggctgcaatggccgattcaatcttatcatttccctgtaaagttttatcggtatgtgtatgttcagtcatgattgtaaaaaatcctttctatataaataatggctacagagaacctgtcaatgacagcctcgcttgcatatttttgtataaaaatatacggacagcaggagagccatccgtatattaatataaagtatttcagttggaagagcaagctaattgaactcccatggagaaatatatttatttggagatgaagcatatccattgttatatttcactgtgacatataaagagtcatcaccatcaaccagtttcacatagcagatattatctttgttgaatttgtgtgtgatatcgatggactgatttttgtaatacaggatgacggaaccatctttttcatattctatatccggagcatttagttcttccataatttcttcttgtgtaaggctgcgttcggatccatcctggttaaatgcaatgccgcctccgccaaattctttattttttccgtctttatctgcataagttccggtataagaaccgtcagaattgattgttaaagtagcagttgtctgatctccgtggatccagagctggactttacgttgaattccgccaagatcggatgcgtaggctgttccggttccggctgttacgatcaggcatgcggcaattgcggctgctattgtttttaatttgtgctttctatttaagatactcattttatctacctccatggaaaaattgtcggaggcggaaagtgtatcaaaagcctgcttgtatttttctttattcgtcatcgttccattcctcctttaaggtttctttgagaagagcacgtccgcgggaaagccgggtctttacattgctgacagaaagatgcaggatatcactgatctcttgtgttgtataatcctcatagtaaaagagatgcaggacaatccggtatttttcgggaagtttcatcactgtgtcaaacagagtttctgattccggtgtttcgaaggttaatgtttccatatattcttctaagttgcatttatttctgtgccagaatgagcgggtgatattctttgctttattgatcgcaacccggatcagccaggcacggatatgttcttctgtatcaaactcttttttatatgtgtgatactgaataaatgtatcctgaacgacatcttctgcatcttgttggttcctgcatatattaaatgcaatcgcatacagatgcttttgatatcgttcgattaaaacttgtgttgctggtttcatgagtactccttttttgtgttgtatctatagaacctgttgccgtaagacctgccataagcatctccttacaaatgctctggcgactgagtggggcatcagacgttcgtttcttaaggcctttcacttataatacaaatgaaaacatagaaaggttacaaattaatgaaagttattttccaaagttgtttttcaaaagaaaactttaggtattggaggtaagatatacattctaactatatcttactatcgagcataggaattttacattttaaaatatacgacgtaaactatattaagaaaaaatagcttcaataataagctgaaaaaattaatatctattataaaatgaaggtgagtgtttttcattatgttttcgaataaagatttgaagaatctgattgtaccgttgtttttagaatagttattgatggcactggtcggaatcgtagatgtatttgtgattggttttgtaggggcggcattgtatagaagttttggaaagacaagtacaacgatgtacatatcggtcattgcaaatatcctgaatgtagtggggaactgtatcggagtattcgggcttcatgcaggagtaattggagtggcagttccgtcactggtatccagaacattttttgcggtagtgatcacgatattatgtttctctaagaagaatccggtcagatacctgaagaactggatcgtgaagattgacgtaaatctgcagaagaagatactgggaattgcagtcccgaatggaattgaatattgccggaggttatcggtttactgcaaatgcagatagtgtggagattcaaaaaggaataaagaaattgggtaaataaaaaaatagcaagacgtctattaaaacagttagaacaatatctgacaataatgaaaaagaaaaagagaattgattatgaagaaaaatattggagcacagctggcattatatccggcaccggtaattgtagtaggagcaatagtaaatgataaaccgacatggacactggtggcacatgcaggaactatggcgcatagtcatctgatggtgtcgctggtacatgcacactacattaatcaggaaattatcgagagtaagaaattatcagtaaatatcgtagacgaagcatggctaaaagaagctgaccgtatgggagtgataagcggaaataaagaagacaaatcagaatcatttgcatacacgattggagaaaacggagcactgttgatcgatgatgccaaggtttccattgaatgtgaagtagatggtaattatgaactggagaactttgataattttgtatgtaagattgtggcaacttatgcgaagaaagtattctgaatgatgcaggtaagattgattatcatacattcaaaccggtactttttgaatttccgacatatgaatattttgtgacgggagaaaaagtgggagactgtgcaaagatgaattagaggttttcatccctggcagattgtgctatcatgacagtatgtcagaaagcgaaaggatggaagtttcatgccggcgagatcagaagaaagaacgaatgcgagaaaagaagagatcatcaatgcatgcgaaatgctgtatcagacgatgaattttaaagatattacgataaaggaaatcggaaatgtcacctctttttccagaacatcgatatataattattttgagacgaaagaggaaatctttcttgcattgttaaaaagagaatacgatgcgtggattctggatctacataagattgttgaagaacatgaaagcatggacgatgagcagattgcatcggcgattgcaaaatctttggatcagcgtcatcaacttctgaagatactttccatgaatcattatgatctggaggaaaacagccgtattgagatgttgatagaattcaaagtatcttatggaaattcactgagagctgtaatgggaattcttgcaaaattcagaccggatatggatattgaaaagagacaggaatttgtctatgcattttttccgtttatgtttggaatttatccgtataccgtggtgacggagaaacagaagaaagcgatgaaagaagcaggagttgattatacttataattcggtatatgaactgacgtatacggcagtgaaaaagatgttgaagtaatgaaaatatttgaaaggagatagaaatcatgaaaacattagtagcatattttagtgcaagcggaacaacagaaggtgtagcaaagaaggtggcagaggcagcaggagcagatctgttcgagatcaaaccagaagtaccatatacaaatgcagatctgaactggatggataaaaaagcaagaagtacggttgagatgaacgatccgtcttccagacctgctactacaggaacggtagagaatatggagcagtatgataacgtaattatcgggtttccaatctggtggtatgttgcaccgacaattattaacacattcctggaaagctatgacttcgctggaaagaagatcgcactttttgccacatcaggtggaagcggatttgggaaaacagtatccagactggaaggttctgtggataaatcggcagaattcgtatcagagaaactgttaaacagagcaggtaaagcggagattgaaagctggctgaagagctggatgtaagaagcagataagatgcaggagataaaatgtatctgatatcggtgtattttgatgacaaaagcaataaaataatttccaattatataaataaaattgcgcaaaagacgggaaatacgtttatgacagataatcatgttccaccacatctgacaattatgtctgtagaggcaagagaggaaaaaaaattgacagaggtgatggaacagttggagaggtccctgaccaaagggcagatccagctggtctcggtcggagtgttattgccgtatgtattgtatgcggcaccggttctgaatctgtatctggaagatatgatcgaacaggtacatgatatggtaaagcacattccggaggtcagaatgagccggtattatcagcctatgcagtggcttccgcatatcacactgggaaagaagctttcaaaagaacagatgcaggaagccttttcggtgatgcaggaactgtttgcgccgatggaagtgacggtggcagagatcggacttgcgaagacgaatccgcatcaggatctgataagagtagaattaaatgactgatcgataaaaaagagcatgaaggaatgcagaggatatcgaaagatgatcccggcatagaattcatgctttttttatattatgacaggatattctgcgttataataagtgaaagaatcaggagattgaaaaagaatatgcagcaactcatataaaaagaaaaacatggaaagccggaatgttatgaaaaagtacataggtatattagcaaaaataacaggattcatactgattgtgattctggcggtgaatatcattctgccgctgataaaaagaaatccggatgcagcttatgagaaagaactggaacagactacatttacggaagaaacgatgaaggatgtcggcggaaaccaggcgggaaaaaagaatgcagagcggatcagatgtattgatgacaatgaagaggctctgttgtggcggctccgtatgatcggaaatgcgaaaaaaagtattgtgttatccacatttgatctgcgtccggatgacagtggtacgaagatcattgcggcattgtatacggcggcagaaaggggtgtgcaggtacagatattgatcgacgggatctatcagaaactctttctggaaaagagtccggtgtttcaggcactggcagcacatcagaatatagaagttggaatctataatccagtcacgaatcttatgcgtctgaattaccggatgcatgataagtacctgatcattgatgaatcgatgtatctgatgggaggacgcaataccaatgatatctttctgggagataaaaagaccagaattaatgtagaccgggatatttttgtatatgaagagacacaaggaaaaggggaatcgctgcaggcactcgagaaatattttgataccatatggaatgaagcacaggtcaggaaaaagaagaaaacatatgctgcatcttatgaagaaaagtataaaagcgaataccatcagttgaaagaacgataccgttcattaaaagagaagtatccggatatcgaaaactatgagcactgggaagacgatacatatgaagcagataagatcacactgatcgataatggaacgcagacggctagaaaaagtccgaaagttcttcaggcgatcgggtatatcgccggacagggagaagaggtggtcatccagactccgtatgtgatctgtaattcctatatgtatcagaaactgaagcagatatcggaaaaggcagatcttaagattgtactcaatgcagtggaaaaaggttcgaatccatggggatgtacggattatctgaaccagaaagaaaatatccttggaacaggtgcgacggtatatgagctgatgaatgcccatgcagtacataccaagacggttctgatagatgataatatatccattgtgggttcgtacaatctggatatgcggagtacgtatctggacacggaactgatgctggtgatcgaaagtaaacgtttgaatgaggaaatccgtgatacagaaaatgtttatattgagaaaagcaaagaagtaaaaacagatggtacggagacggaaggaagtctgtataagaaaaaagtactgacaccggaaaagaagcggttctatgcatttctgaaaattattatcagaccatttcggcatctgttatgagcagatagtgaaaggaatacattcgtttcaacgataagaattggaaagtaaaaggaaaagaaacaaaatgattaacagagaagacatgctggcactgaccagaagaatgacagttaagagaacatctatgaccagaatcgccggaggatatctggacatggatgggtatatagacgggacatttaacacgggatttttaaaattgagcccagatgagaaagaaaaaaatttacagatagcaaaagtaatcccatttgcagatacgaatcagaatctgaaagaatatgcattttccagtgagaagatgaaaggtgacagtatgtggaagcttttaatgggaatgcgtgtgtgtggactgaaaaatgatgcattaatggagaccttttatgagattgtcggggaacaatatcaggcaatgggagattatgcggtctatgtatttcatgacaggtatgacattccggcaaagggcaaagatcatgtccgccagggggaatccgaggagatgttcgaatatctgatctgcgctatctgtccggtgagtggagactatgagcccggagaaccggagtgcggctttcttttcccggcatttatggatggcgcagcagcactcaattatgtggacgtatatcagaaggatcaggcacatccgcatacagagcttctgaaaatgcttggcgtgtggtgagatagagaaaatttcttataaatgagtttaatggttcccaattccttccggatatcctataatatagtggattgagtttataggaaaaggcagggaatatacaatgcatacaatgaaaaaattcatccggtattatgccccgtataaggcggtattctttctggatctgatctgtgcggcggttataagtctggtagatcttgcatttccgcagatattgcggacacttacaaagaccttgttcgcagaaccggcagaccgtatattacaggcccttctcccaatcggagcggggcttcttgtaatttatattttacaggcgctgtgtaaatattatgtcagctatcagggacatatgatgggcgccaatatggaacgggacatgcggcagcagctttttgaccattatgagaaattgtcattttcatattatgaccagaataattccgggcagatgatgagcaagctggtatcggacctttttgatatctcagagtttgcacatcacggaccggagaacttatttatttcgctgatcaaaattatcggttcgttcatattcctgtttctgatcaactggagactggcaataccgcttctggttctggtagtgttcatgttgttcttctcgtacggacagaataagaagatgcaggcgacattcatggacaaccggcgtaagatcggggatgttaattcgagtcttcaggatacactggccgggatccgtgttgtacagtcctttgcaaatgaagagattgaacgggagaagttccgaaaaagcaaccagggatttctgcgttccaaggatgccaattataaatgtatgggaagctttatgagcggcaacctgttctttcaggggatgatgtatctggtaacgctggtattcggaggatggctgatcgcacatgggaagatggaggcagcggatcttgcgatgtacgcactctatattgggatctttatcagcccgatacagattctggtcgagcttactgagatgatgcagaaaggactgtccggattccgcagatttctggatgtggtagagaccgagccggagatcgtgaatgcaccggacgcagaatcaatagatgaagtaaacggacacgtttcttatgaaaatgtatcgtttcattatagcgacgatgatacaccggtgctttctaatgttacattcgacattccggcaggaaaatccgtggctttagtcggaccttcgggaagtggtaagacgacgatctgctctctgcttccgagattctatgatgtaacaggcggacgtgttacgattgacggaaaagatgtccgggatctgacactggaaagtctgcgtaatcagatcggactggtacagcaggatgtgtatctgttctgtggaagtattaaagagaatatcgcatatgggaagccgggagcatctatggaagagattgaagacgcagcaaggaaagcgaacattcatgattttattatggaactgccggacggatatgatacatttgttggtgaacgtggaacaagactttccggcggacagaaacagagaatctcgattgcaagagtatttcttaagaatccgtcaatcctgattctggatgaggcgacaagtgcactggataatgagagcgaacgctggatccagaagagtctggaagagcttgcaaagaaccggacaacgattacgatcgcgcatcgattatcaacaatccgcaatgcggatgagatccttgtagtggcagataatggaatcgcagagcgtggaacacatgaagaactgttaaaacagggcggaatctatgcgcattataatgagatgggataggcagaagataagaaaaacggaagctgctctgtgagtagaaacataaaaattatcaataaagaaatttgcaaaagaaaaagattgctgtgaaaagaatctatgatataatttacaaagatatcagcggcagaaaagacagtgcaaaactgtaaaggaacagtagaaatgattgatatcagtgaataaaaacggccaccgaataaggcggcaaatcataagaaacagaggtagaattatgggaaaaatcagaattggtatcgttggatacggtaacatcggacgcggagtagagcagtctatcaagcgtaatgatgatatggaattaaaagcagtatttacaagaagagatcctgcaagtgtaaagatccagacagaaggggcagaagtaaagcactttgatgatatggaagctatgaaagatgatatcgatgtaatgatcctctgcggcggatcagcaacagaccttccggtaatcggaccgaaggtagcagcatcattcaataccattgacagctttgatacacatgctaagatccctgagtattttgcaaatgtagataaagcagcaaaagaaggaaagaatgtaagtattatctcagtaggctgggatccgggaatgttctctctgaatcgtctgtatgcagagtctatcctggtacagggaagcacttatacattctggggaaaaggggtcagccagggacactctgatgcaatccgccgtatcgaaggtgtgaagaacggaatccagtatacggtaccgatcgaagcagcggttgaccaggtaagaagcggaagcgaaccggagttgacaacaagacagaaacatttaagagagtgttatgtagtagcagaagaaggagcagataaagcagccattgaagaggcaatcaagacaatgccgaactactttgatgaatatgatacaacggtaacatttatcacagaagaagaattaaaagaaaaccacagcaagatgcctcacggtggattcgtgatccgtaccggtgagacaggatgcgaaggcaacaagcatgtgatcgaatattctctgaaactggattccaacccggaattcacaggaagtgttctggtagcttatgcacgtgctgcacacagactttctaagaaaggtgaatcaggagcaagaagcgtattcgatatcgcaccggctatgctgtctcagatgacaccggaagagttaagagcacatatgctgtaagagataattaataaaaatgtatacaagttctatcgtagactattaatgttgtgatggaatataaggagcagaagtaaaaaaatcaggcatcggaggcgaaatgaaaactcgtttccggtgcctgattttgtagaaattaaggatttatttaagatttcctgctgactggtttatggtttgccggacagagtggaaagaagctatctaaaatgagagattttacgtacaataccgaaacgtacgatcggtcagaattctcgcaaatatcagtccaagcggcaacatcacaataatcataatcgcagaagtaaaccatgaaaccgcatccgtcagggacataatcccgaaattataaatcgcacggtacaggtaaagtcccggaaccatgatcacgatagaaggcacggtaagcgagattcttggatatccattactctttttaataaaagaagcaagcaatccggcagtcagagccccgataaatgcggcggcggccggaggcatatgtgtgaaatcaacaagttcaagccggagtgtattggcaatggcaccaataaatgcagccgttgccgccatcgaatgagaactgttgaacatgatcgagaaaccgaatactccgcaaaagcttgcaatcacacggaaaatcagacgggcagcagcacttagatgcagtgccgtaaaatcggccggttccagatgcagaagtaaagccatgatccatgcaaataaagtggcaaccataacgataatgattgcataagtaagccgctccagtcccgaacgcagatccagctttgcaaggtcgatcccgcttgtaataaatggaaatcccgggatgatgaacagcatcgagcagatataaccagcttcatgaaattccggaatgtgaaagacaagttccgcaagtttcagaaagactgcataggtaaaacatgctgctgaaacagagactgctatattcaaaaacagtgtgtaatggtgtttgatcagtttcgtacggatcagattaccaatcccggcggcaataaaagcaagagccatctcaaccggtccgcctccgagtaaaaaagtaaaaccgcagcaggcaagagctgcggcaagccccagctttgcaggtgaataaagagcatggatttcttcaatttcatccagtcgtttatggatatcttcaccggtcatatgtgcttcttcttccggaaaatgatctacaaactgttccatgcggtaaagcttggaggtattcactcccgtattggcaatactcaacgactgggaaacacaatcgtttccatcgaaacagttaaatacaatggacatcaatcccacgtctaccgtacaggttacaccaagctctttggaaagccggttcatggaagtccgtacacgccatgcaccggttccacaggagagcatgattaacccaacacgaccgatgacagaagctttctcgatcagtccggcttctgcaatcaacacattactgtcatcattggcgtagtcatgccatggaatctccatatgatttttttccataatatcaataaagtcagaattagttgtctgcataaatgatcgcctctgctttggaaacgtggcgttccagattttttaagaaatgtgaattcggaaggaaaactccgatctcatcataacgggtattatcttcaacaagagaatcctgtccatagaatacataggacataggaagctctttttgaagttttatgacaatatccagaatagcagaataagcttctgcttcggtttcttttaattttacggtatccggtaattcacggatcaacagtacaccgttattcttttccagaatgttttgttccggttccatatcgtcggatgtataagaatggctgtagcggtatgcctgtgccagaaaaatattctttggagctccgagatctgtatatacctcatggaaatgacggtattcccgttcatgaatcgatctcttatattcaggcagtaacattccgttttcatctgtcatgatcatcggattctgttttccgtccgcattgaaccgatagggaatcaggaatgcatttcttaaaagatcaaagactgtattctgacagatagccatcagaaacgcagataaatcccgattgcgataagaattaaaaagagcctgtgcgaattctgtagatgacggagaatcgggaaggtctaccccatcgttactgaataaataactgcagaatgtttccatcagtttttcacatgcccatttatcttcggatattttcttaaataagatttctgatttttcttctctgggaaaaagtgttttttcctccataataaagcgcttcctttcatattttcatccgaataaattatacaactgtgataaagataagtaaaagctataattaatatagcggatatatgattatgatataataaagaagtgaaatctgagatttttatgccaaaatatacaagaaagggtggcggtggcaggctatatagatgtcaaaatatgtaagaaaaattgccggtggcagcttctgtagatagtcggttgatgatttgaaagggatatttgatatagtttaaaactatgacaaatacacatttttttgtattatacaagtttatcaaaacaaattataataaatccatcgatcgagaacatcatcaagaatatgaaaaatataaaagaaagccatcagggacaacaaaaaagacagaaaacctaagtccctgccggcaaggaggaaataatcatgaacacaccatttcgttacgactttgtaggaagttttttacgcccacagaaattaaaagacgcaagaaagaatttcgaagaagggacaatctcacaggaaaaactgaccgcagtagaagatgaatgcatcctggaactggtggcaaagattaaggaacttggatatcatgtgatcacggacggagaattcagaagatcgacatggcatctggatttcatgtggggatttgaaggtatcgagcatcagaagacagtagaggggaatacaacatttgacgcagaagctgcaatgattgatgatacatacatgacgggaaagatttcagtaaagaatcatcctttcgtagagcatttcaaattcatcaaagcattagaagatgaaaatactgtcgcaaaacagactatcccgtcaccgggacagttctatgcatactttaccggggcacagcttctgaatacaacattagaaatctatggatcggaagaagcatttgccgaggatgtgattaaggcatacggtgaattcgtgcaggaaatctatgcagcaggctgccgtaaccttcagtttgatgactgcgtatggggcggaatggtagatgcgaagatggcagttgcactgaccggaagaacaggacagagactggaagattacaagaaactccttctggaactgaataaccaggtagtagcacaggcaccggaagatctggtgatcaatacacatgtatgccgtggaaattatcattctacattcttcagttccggagcatatgattccgtagcggatttgttattcggagaagaaaatgtaaatgcatattatctggaatatgacgacaagagatccggcggatttgcaccacttgcaaaggtatccggcgataagaaggtcgtacttggacttataacaaccaagacaccggaactggaagacaaagaaaaagtaatcgcaagaatccacgaagcagcaaaatatgttccgcttgaccgcttatacttaagcccgcagtgcggatttgcatcctgcgagatcggtaataagctgacagaagaagaacagtgggcaaagcttaagcttgtaaaagagattgccgacgaagtctggtcagacagataagccagaacagattggccataagccagccgataccggtagcaatggcaggggctgccagctcaaaatgagggaagaagaaccaggttaagattatgcggagtgcaatctggagcgtacttccggctaacgtcagaaccattttcccaagtacgttataagtaccggtgaaggttccgccggtattgatcgtaccttttgcaaggatccgatggttgcattattgccggagggacacaagctggcaaaaagaaagacattttcggcaaaatttgcagagacggaagcctatattgtaacatgtccaggattagatattgatggaacacgttatctggataagcatgggattaagccgaatgtacagttttcgacaatggatattcaggcaacatatgcgatggcggcagcgggaatgggtgtgagcattaaaatcgttctatcatctggaagtatgatatactgataacaagacctgcaaaaaaagatggaggtggactacatggatgttgcaacgatggtagcgattaataacctgaatatggttacagtgatggcagtacaggcgccaaataatgtaatcacgatcgtaaatggagaaaggacggaagaagatatggatggttcaatgttagatcagtatatgggaaaagattgtacggtaagtctgttcaatgaagtaggagcaatcaaaggaaagctcatggacgcagatatacagtgggtaaaggttgatacaaagaaagggacacagctgattaacagaaatatggtacggaatattacttttgataataaatagaatgaataaaaatagttgtttcgaaaaaagtcagaaatgaataaaaaatgagttgacatttcgtgtatgagttcttatacttaaatatgtagataaaatacggggagcttgtgtactaggctgagaggaagttaagaacttcgacccatatacctgatttggataatgccaacgtaggaatgtataacgtagattttaggagagatgcatttagttggtagctctcttttttgttactatgtgacggaaatcaggaacaattgaatatcggataagttgagagtgaacgagagttcatgaaggggtgcaccaccacgggtgtatttacttcgtgaactctttttttcatactaaagtatgcaagagaagttgtcagtggcaagttcgctgtatatatccgggaaaggagaacatacatgattatcgtaaatggaaaagaaatcaatctgacagaggatactactgttgcagaatatctggagcagaatcagtatcaggtaaaaagaattgctgtagagttaaacggagatattcttccaaaatatagttattccgataccatgttaaaagacggcgaccgtctggaagttgtgacatttgtaggaggaggctaacattcatgggagaaatcgtatcagaaaatatgacgaaaaatgcgaacgcaaaagtacttagtaaagaagagattatggctgcgcttaatgaaagacattctccggaaaagcagaagcatctgtctgcaggaagggttgcgatagccggacttggcggattaggatcaaatgtggcatatgcacttgccagaatcggagtcggacatctccatctgatagattttgatgtagtagatattacgaacctgaatcggcagcagtactttatggagcatatcggaatgtataaaacagatgcgttaaaatcattactgttaaaaattaatccgtatctggatatctatacagactgtgtgaaagtcacagaagaaaatcttaaggcactatttcgtgacgagcctattgtatgtgaagcattcgataatccagaggcgaaggcaatgctggtgaatggaatactggaatatttcccgggaaagaaactcgtatcggcaaccggtatggccggatacggaagcagtaatacggttcgcacacagaagttaatgaagaacttttacctgtgcggagaccgcgagacggcaccaacgtatggaaatggcctgatggcaccaagagttgcaatctgtgcagcacatgaggcgaatatgatcacacgtctgatccttggagaagaggatgtgtaggaagacaggtaagaaacataagattcatgccgcaaaaaaagatagataaataaaaaagcatgagcagaaaataataggaaagaaggtcctgattatggataaaaaagaaataaaaaatacagatacatttacacttggaggaaaagagtttacttctcgttttatattaggttcaggaaaattttcactggatttggtgaaagcatgtgtggaaaaagcaggggcacagattatcacactggcactccgtcgtgcaaatgaaggcggtctggcaaatattctggattatattccggaagatgtgacacttcttccgaatacatcaggagccagaaatgcagaagaggcggtacgtattgccagactttccagagaagtcggatgtggcaatttcgtcaaagtggaagtggtaagagattcgaaatatctccttccggataattatgagacgatcaaagctacagaaattcttgcaaaagaaggattcgtggttatgccgtacatgtatccagatctgaatgctgcaagagatcttgcaaatgccggtgcagcatgtatcatgccgcttggcgcaccgatcggatcaaataaagggcttagcacaaaagactttattcagatcctgatcgatgagattgatctgccgatcatcgtagatgccggaatcggacgtccgtcccaggcatgcgaggcaatggagatgggtgcagctgcagtgatggcaaatacggcaatcgcaacagcaggagatgtaccggcgatggcggaagcatttaagaaagcaatcgaagcgggcagaagtgcgtacctttccggacttggaagaacgattgagcgtggtgcaagtgcatcttcaccgctgaccggatttctgcaggattaggaggcacgacaaatgggaacaaatcatgaagatacacatattaatgaaagtattttaagcgaggagattctggaagaccagaagaagaaccggatcgatcacatgacctatcttccaggcatggaggatatcggatcagaaatactcgaccaggtcgtagcagccatggaggcttatgattataatacatatacagcagaagatgtaaaacgtgcactggcacatgcagagcgcacaccggaagattttcaggcgttattgtcaccggcagcactgccatttctggaggaaatagcgcaggcagcgcagatcgagacgagaaaacattttggtaacagtgtctatatgttcacaccaatctatatcgcaaattattgcgagaactattgcatttactgtggttttaattgccataacaaaatcaaccgtgcacagttaaatgcggaagagattgaaaaagagatggcggcgatcgctgagacaggtctgcaggaaatcctgattctgacaggagaaagccgtaacaaatctacagtagaatacatcggtgaagcatgtaagatcgccagaaaatattttaaagttattggtctggaggtttatccggtaaattcagacgaatacgcatatctgcatgaatgtggagcagattatgtaacggtattccaggagacatacaattcggataaatatgagacacttcatcttgcgggacataagagaatctatccatatcgtgtcaatgcacaggaaagagcattgaaaggcggcatgcgcggagtcggattcggtgcacttctggggctggatgatttcaggaaagatgcatttgcgaccggatatcatgcttatctgttacagagaaaatacccacatgcggagattgcattctcctgtccgagacttcgtccgatcatcaacaatgacaggatcaatccgatggatgtgcatgagccgcagcttctgcaggtagtgtgtgcataccgcctgtttatgccattcgcaagcatcacggtttcgacacgagagtgtgaaagagtccgcgataatctggtaagtattgcagcaacgaagatatctgctggtgtaagtaccggtatcggaagtcatgtagaagatatcgaagacaagggtgacgatcagtttgaaatctcggatggacgttcggtggatgaggtctatcaggcacttctgaaacacaatcttcaaccggtgatgagtgattatatctatgtgtaacaggaagcatcttgtgttaaaaacatgccgcatacagctgaaaggagttgtcagtgataaaatctgtaaacaatcaggactttaagatcattgcagtcagtaatcggaaattatgcaaccgcccgtttttagagcagatagaaagagtctgcaagatacatccggaagctgtgatcttaagagaaaaagatctgacagaagaggaatatgggacattggcaaaagaagtaatgaatatttgcagccgttatcaggtgtcttgtattcttcataatttctggaagactgcactagaactgggatgtacatctgtacatctgccacttccaattttgcaaaaaataactgatgaagaaaagaaaaaatttacaaagattggaatttctatacattctgtagaagaagcaaaagaagcagagcaattgggagcttcctatcttacggcagggcatatctatgcgacagattgtaagaggggattaccgccaagaggattgggattcttaaaagaagtttgccgggaagtcagcattccggtgtatggaataggcggaataaagttcgatgaagaacagtggaatgatatgaaaaaatgtggagcagttggtggatgtgttatgtccggaatgatggaaatatagtaatcgaaataaaacagctcatttttgaaagagcaggaaagccttctgagtcggtactcggaaggcttttgctttacactggcatattagtgtatatcagatagtactttacaaaattatttctaaatgttatattaatacaaaaatgaatagttcaaaaatgaaataaaaaggagacctacatatatgaacacaggaattgaatttgcagaaaagctgtcaaaggcatacagtgagacctgcaaaccgttatgccatgaactgaatattccacagaccgcatttgacatcttacttttcttggcgaacaacccagaatacaaaactgccagagacatcgtagaaatacgaaaaattaaagccaatcttgtatcggtaaatgtggataaacttgtgaatgaaggctatctggagcggaaaagtgtagaaggtgaccgaagaaaagtcaatctgatctgtacagaaaagtcaaaagagattatccaagaaggacagaaacttcagcagtcgttcgttgaaaaactatttgaaggaatggatgaagatacaagaaaagcacttcaaaaaggaatggcgcatatggaagcgaatatagagaagatgttggaggaaaagaactagatgaatacaatattaatgattattgtaacatttttcgcggggatgggagccggactcggaaccggatttgcaggaatgagtgcggcggcagtgatcagtccgattctgatcacatttcttggaatggatccatatatggcagtcggaattgcactttcatcagatgtacttgcaagcgcagtatctgcctatacatatggaaagaataagaatctggatgtgaagaatggtctgatcatgatggtcagcgtacttacctttactgttgtgggaagttatgtgtccagtctggtaccatctacaacgatgggaaatttttcggtatttatgacattcttgctcggcattaagttcatcgtaaaacctgtcatgacgacaaaagaagccatggaaaaagtatcgccgaagaaacgtgcagtgcagtcgttaatctgtggtgtcatgatcggatttatctgtggatttatcggtgccggaggcggtatgatgatgcttttgatcctgacctctgtcctggactatgagcttaagacggcggtaggaacgagtgtgttcatcatgacatttactgcctttaccggtgcagtttcgcattttgcaatcgggggaatgccgaatatagcggtgtggatcttatgtattgtgttcacactgttgtgggcaaggattgcggcagtatttgcgaataaggcaacaccgaagacattgaaccgggcgacgggtgtgatattagtggttcttgggattgtggttatggcgttttctattttaaattaatagagagcaggaagaaattaatattataggagagaataagaggtattaatagaaaaataatatgatgttttgtttattatgcattctacagggactgccggtggcaggtcctgtagaaagaaaaacattgcttatgattctttaatatttcctgcttctatattttctttgagtatctggtctgttactttatataaagtctcagatcccagctgcgttttccgttgtcttccgtatacctgttcggaagtaacctgatgctcacgccagtcgccaccgccgttactgttattgagaagcaatggctgcaggttatccagggaatgtgcaaatttggattccggtgtctggtaattttcgaattcatcaaagaatgaagtcagttcttttttctgatcttctggtaacagtgagaaaatccgttctttggcagcatcttcacgtgctttctgcgtctttaatccttctgtatcgtaggcataagtatctccggcgtcaatttccacaatgtcatggatcaggcacatgatcataacttttgcgatatcgacaggttcattggcataatcttttaacaggtatgccataattgccatatgccaggcatgttccgcatcgttttcacgtcttccgtgtccggaaaggtgggtttgtcttaatatattcttttctttatcaatttcgagaatgaaatcaagttgttgttttaatctttcattcatgttgaattcctccttgtatgattggtacgaataaactataagatagtataacataaatgaaagtaggatgaaaagcaaaaacacagaaaacatataaaacatatttacttaataggaaaacggtgttaaactccagttattaaaagataaaagagagaaaagctcagaaggcaggtgcaggaagtaatgaaacagatattatgctttggggattcgaatacgtgggggttagatggagagaccggaaagcgtttttcgtgggaagaacgatggaccggaatcttacaggaaaaactggcggaccgagatattagaattgttgaggaaggtctgtgtggaagaacgaccatatttgaagatccgcttcgcctgggaagacggggaacagaattgcttccgacattattggagacgcacacgccggatgcagtcgtgttgatgcttggaacgaatgactgcaaaactatattcggagcgtcagcagaaatcatcggaaaaggaattgccaggttactggagcagatcaatcagtatgcagataagatgaaggttcttgtgatatctccaatctatctgggagaaaaggtatggcaggacggatatgatcaggaattttcgccagaatccgtagaagtatcaaagaaattagaaccggtatatgaaaaagtggccggaaagtatggcaaacgattcatgcgggcagcagattatgcgagtccgtcggaagcagatcaggagcatatggatggacagagtcataagattcttgcagatgcgatttatagaaaattagaagcagagattttgtagaaaagataaaaatccgttgtcagtcaatggcatctcctgttttactggattttcagtaaagggagcatatcaggacaagacaacggattttctgctatcttttggatgtaacttctgcaacggattttccggtgattaattccattaccgtacttttggcatcgatagcggtaaacactcctgcaagaatgaaaatggccccgagatatcccatctctgtgagcttctcatgcaggaagatgaaggaaaaaatcgctgcaaagatcggttccagggagaacaggaatccggtattctccggtgttgtatattgctgcacaacagtttgtacaacgaatccgtaagctgaggacaaaagagcaagtccaagaacggagatccagtccaacgcggtgctcggaaatatcggggatccgaacaccagcagaccgattatggaataaagacaggtaaagccctgctggtagactccgagtgcaagtggatctacctgtctggtaaaatagctgtttaatacaatattgattgaataactgaaagccgaaagcatacaaagcagcgttccgggcttgacagcaaatatatcaccgccgttgatcagtatcattccgatcaatacgataatgattccaagcctgacatgatgctccggaagtctgcgggaaataattgcatgaatgatcggaacaagcacaacggtggtgctgaggatgaatccactctgagaagcagtgatcgtatttaatccgtaaaggattggcgtaaggtttgtaaaaagcaaaaagccggtgatggcactgtagagtaaaagtcttttattaacgttcagtaatcttttgaaaaatataagtaccagaatcagaaatgcgattcccgtacgcagagccatcagcatcagaggggaaagtccctcaattccaagtttcataaatatataagaagttccccatgccatagagcaggttgtaagaatcagattggctttttttgtcgacataattggcgattcctcctatgtaatagttttcttgttttttattatatagtagaatagaatataagtaaaatgcttcggtagcggtgaagaaattcctgcagtttgtaagaaaaagggaaaatctttgattcgtgtatttttaagtaataaaatatggagaagtggatagtgtatatctataaataacaacatttcagaaagggagccttagaaattgctggaaaaattaagagaacttggaatcagagatgatctgattcgtgagataacagaatatagggaaacatacccggtagaacaagaatatggttcaagaattccgaaactggaacaattttactatggaaaagaagtctgggagcaggcaattaccgcaattttgtgtggagagaatattctgttggcaggtccgaaagcaacgggaaagagtctgtttgcagaaaatttggcgggagtatttgcaagaccacggtgggatgtgtcgtttcatgtgaatatggatgcagcttcattgattggtatggatacattccgtgggggagaggtatctttcagaccggggccggtgtatacagcggcaaaagccggtggatttgccatattagatgagatcaacatggcaaaaagtgaagcaatggcagtacttcatgcgacactggacttccggcggacgattgatgttccaggatacgaacgtatggaattacatccggcgacaagattcattgcaacgatgaattacggatatgcgggtacaaaagaactgaatgaagcactggtatccagatttgtcgtaatccagatgccgatgatttcaaaggaaagtctgattaaattaataaaaaagcattatccggacatcagggaagaaggagcaggagaactgacatttatgtttctggaattacataagaaatgtgaaaatggagagatatcttccaaagctctggatctgcgtggtctcttaggagcagtcggtctgatggaaaaaggacttgatatatttacggcactggatatgggaattaccaataaaacatttgatacctatgaacagaccctgattcgtgatacgatccgtacaagaatctcgaagaaaacggtgaagaaagatttgtttgtgaagtagcaggaaagtagtgtgttatagcatggcggaaatagaagaacaagaattaagagaagcaaaaagagcatgcaattttatatgggcggcggcagaaaattatgaacttgaaccacttttccttgcatttgcatcgaacggaacggcagatatgtatctgaatctgattatcggtctgacttacaaatggtacgatcaggagaaaatagatgatttttttaatcagctgggaggaaaagaccgggaactgtatgaaggtcttctttggatcggacttgagaatgcattgtaccaaaaagaaagaaaaataagatcagtaatggaagaactgcgaagggagtatgcgctggataatctgaaccgttacaggaattataaagaatatgcaaggatagaacaaatccggaatgcacattgcagagaaattttggaacagccatccgaactaactacagaagaggaagaacttctgcatgcattttcctatacggaagagatgacaacggatgagattctggaacagacacgagagaatctgtggaaatatttttcttatcgtccgtcaaaagctgcgaaaaaaaaaggtgtttactttcttcagaaagttgccggagcattccattctgttggaaacgtgagtaccacatatgtacgggcgaagtattatgaagataaagacgttggcagtgaggaaaaaacaggagttatagagcggtcaaagcattatctggtgcagttctcattaaaaaatgatccgggggaggcaagaatatatgtagaagcttgctttggcaagaatatgtacccgcagactgagcaggaaagaatagagcaggagatatgtgtggataaacataagaattgtcatgtactctttacaagaggaagatcaggatggaaagaaaagcagaagagcaaaacaaaattaaaagaactttcggaaataaaaagaaaacgagaaagacaggaaatcctggaatttcaaaaagaatctgcccagcaatatgagaaaaataaacagtattatgagaagaatcgtgcaatatacagaaacagtataagaaaacttacagagaaattacgcatctgtctggagacacaggacgagacatttccagaaatggcaacgcacgggaagatcaatccgagagaagtatggaaagcagtttatctggataatccaagagtattcgaacggaaagaagaagtggagattccgggattttcagtcgatatgctgatcgatgcatcgtcttccagaaagcagatgcaggaacagattgcggcgcaggcatatgtcctggcagaaagtctggaagagtgtggaataccggcacagatatattcctattgcagtatccggggctttacggtgatgcggatctttaaagattatgaagaagaacaggttggaaatgaattattcggatatgttgcggcaggaaataaccgggacggactggctctgcgtgcagcaggatatttgatggaagcaagtaagaaagcaaaaagaattttacttgtactgacggatgcaaaccctatggacgaccagaatatcggtgagggagctttttatacgaacaaggaatatactgaccagccggcaatagaggatacagcaagggaagttcagaggttaaagcaaaaaggaatccaggtcataggaatcttcatgggaagtgcaaaatccagagaggcagcaagagagatattcgaccgagaactggtgcagattcagaatattaatgattttgccggggcagtggggcgagtgctgggagaagtgatgacgccataggggacgtaaaaaagtggctttttcagtgtcccctatggcttacaaagtacatatattaataacaaaagcatctggagttaatgtatgaccagtcagaaactagaaaatcttttaaatcttgcactgaattccgcggaagatgagcgggaaaaatccttgaatttaaatgttggatatgatccgcttgaccgggaatgggatctgatcatcaaatattccgtaaatctggaccgagtcaggaagatagcatccaaagtaacagaacttcaaaatgaatatgcagtcatccgaattacagaatccagaatcgacatcttatcggaaattccggaagttgaatatgtagaaaaaccaaaacggctgttctttcaggcagcagaaggaagacgtgtgtcttgtatcaatgcggtacaggatacacgcctttctctgtatggacagggaatattggttgcaatcatagattcgggaatcgattatgcgaatatagattttcgaaatgcggacggaagcacgaggattcggtatctgtgggatcagtctctgaatccggcagatggggaaacagcaccggttggatacagcatcggtgtggagtatacgaaaggacaaatagatgaagcattaaatgcacaaactgtatcagaacagagaaggcttgtgagaagccaggacatttccggacacggtacggcagtggcgggagtagcagcaggaaatggaagcaacagtggaggacgttatgccggagttgccatgcagagtgaattgatcgttgtaaaacttggtaatcccatacaggaaggattcccaagaacgacagagctaatgatggggattgattatataataagaaaggcactggagcttcggatgcctgtagctgtgaatatcagttttgggaatacatacggcggacatgaaccttataattaagggaaaacataagaaaacactgatatttccggtgctttcaggagattcagtgttttactcggattcatgattggttgtcattctggttttataatactcggttaagatcatattgatctgctgggaacgtgtacgaaagttctctttcgcatccttatcaatctcagcgacaagttctttggaaagggtagtatagacctgaacattattggaactgatagccatgtggcacctccggtttcattttaatagctttattctaccatacttcatgggagggggcaatgttaaccgggaaacggagcacgatttattacagggcacacttgccggaaaggaatataaaatgaaaaaacatattacagatgagaaaacaggaatcagctatacattatgcggagattattatttgccggatctggaattgaaagaacaggaagaatcacattatggaaaatacggaatgcttagaaaaagttttctaaaagaacatcgaccagggttatattcctcttatctgctgacgggcaaattaacagcacatttgaatgaagtagatcaacaggcgaatgaaagaatggaagtgctggtagatcagatgatggaaagacaggcaattacagaagaaccgaaagtccgtgatcagatggcatgggttggtgctgtcaataatattcggaatgctgcggaagagattgtgttaaaagaaattgtgtatatttaataatttcttggcagggtatgcttatagagattaagatatatccagtgatcgcactatggaaacttgagaagcccatagtccggaaggctccttataggggcctttcgttatttatgggttaggaagaattacaattccatatcatgtgactttttcttagatcgagcaggctgatttcgccgcatctcctgtttcctctgatattcaagttcccaggtacaatgggaaaaaacatcaggatcctccacattgagataatccacctcattggctgcaatatcacggcggtgatagtcataatacttaccaaaagtacctttgagctgctcgatcagcttatcccggaaatcaggacgtatctggattctggtgtccagcaattctgtatactgttcaggttcaggacgaaatttttcttcccggaaagcggcggcatctttttcaagctgttttttgagcgagatgtcctgagaatctaggatatcaagattgttattcatctggtcgtatttcttggatagattcgtcatatctttatcggtagagcattctgcctggaagattagctgctctgtccttgatttcagttcttcgatttcttcggtaatagtggtaagctgttgattcaattttatatgctggatgggattcaaaatactggttttctcttttttcacattcagttctttccgctctgtaactttagctttgagtttctttttaacggtgttgtatttattcagtattggattaaaatgattcatccagtcatggatcacttctttttgcatctcattgtggagcaaatgatattgtgtaaaaatcatgtgatttcggattgcttccaatgtttctgcaattattggaatagacttttctacagcttcagccagttttgctacttttgcttttaattctcggagcattttgttatccacacgaatctgacggttgatttcacagcggtctgctatcatgcctttcttttccatattctgggcaatgtagccttcatggnnnnnnnnnngcggattgcttccaatgtttctgctattattggaatagatttttctacagcctgtgccagttttgctacctgggcttttaattcccggagcattttgttatctgcacgaatctgacggttgatttcacagcggtctgctatcatgcctttcttttccatattctgggcaatgtagccttcatggatggttggctgttcggtgattccctgatctgcaaagctgcggtgatcaatggtagcatttatctgattacgtgcaagcatttcatttacggcatctgcccagtttgcccgccagatgcaaagttgttcatcactgttccattgttcggaaataggattctgtctgccatatcggctgctcttggggtgtttatcaatccgttcatatcctttttcctgtgcaacagaggaagtcagatattctttctttttcccaactttatactgaattgatatttattttaacatcaatccaagaggatatatagctcttttagagtttacacagaattaattacagtctctattctggatctagactcaatgattccggaaaatcatttgttgagacagattaaaaaggacctgttgacaaactacttatattcgcgatttctcacttgtgaatttaatcaaatattcaaaaaatgactggttaaggctttgattacatagccttaaccagtcgttttagatttaatgccatagctgaaaagaggcattcttcttccgcacgaataatccctcttttatggattctttttaaattgtgttccctttttaagactgaaaaagtgccttcagcccatatttttcttaaacgcattactttgacatattcaggtgtatgatattttagtttattacgatgaaatgcaggataattcccactggcgttgatccgaatagctccttgatctatttcgcaaatagaaagtcgtggacaatctttacacagtttacgggcacgagaatacagtctataataattcaaggtgcttcttttgaagacaagcctttgaaaatttaactctttctgattttcgcatacaaagcagtctttatcttgattatatgtaaatcccttttttaaagcattattctggtattcgcgaattgctgtatagccttcgattccaagtaattccagtcctctatgaacagccccaacatcataaccgccatccaatgccagcacctttatatcaataggtaaggcctcttgttgctgttttacatgattgagaataatatcactttcacgatgatttgctggataacaattaacgcctgtgattataccatgtcccgtatctaccgtcatctctgttaaataaccaagcccccttttccttttttggtttatatatccacaatcagggtctgttgtacttttcagagtacgctttgtaacttctttcgttataggttctttatagcccggaatttcagacatttctttttccagttcatcaaggtagtggatggaagactgttgtactgtctctattacttctatagaactgttaacagaaacatttcctggtaaaaatgatccatcggcaactaccgtattaccacttacaattcccatatttatacattgcattatgatttcattaaaaatatctctgaaaagagtattatctctaaaacgtctccgacgattttggctaaaagtactatggtcaggaatcttctgcatcagatcaagttcacaaaaccatcgatatgctaaatttaaagaaacttcctcttccaatctgcgttctgatttgattccataaagatatccaattaatagcatctttatcataacaactggatcaatagattttcttcctgtatgtgaataaaaagaggacgctttttcatagatgaaatcaaaatttacactgtttttaatctgtctcaacaaatgattttccggaatcattgagtctagatccagaataagaagttgcatttgattatcaattcttcccatcataaaaagtacctcctatggcaaaattattacatatattttaccataaagaaggtactttttctttactttgtcaacaggtccaattatttacacactcaaatcatcattcaatgtacgttcacaggtcgcctgtctgtgaagatatacaagcctgttattgtagtcaatatcttcccaacgaatagcttttgtttctccaacacggataaacagatagaaagataactgtattgcaagagagtatggctctatgatacaccgaagataatttaataacttatgcgtatcatcacgggaaaatacattgtcactttgtacttctactggcttataggtaaactgtttgaaattcacatcagagacaggattatgtgatataatttcttcttcgatcgcataactcattattccattcaaaacagaacgggcattactgactcgcttatgcgtgaactgtcggtcttttgtagcttctctgaaaaagcggataagcgtgattggtttgatttcgcctatcttcattttaacaagttctgtatctttgaaaaatctattccattcagatacatattcttgaattgtttttgcttttacggaagtataatctcttttatacaaaagccattcagcatataattcttccagtgtgacattctgacggttttcagctttctgcttttcgatataaaatctgatgatttctttttcaaggttctctttactcttcctcttattatttgtgaaacgcaatatgcggacaaagacaattataagtccgacaaccggacgaagaactgacagaacagactannnnnnnnnncagaataagaagttgcatttgattatcaattcttcccatcataaaaagtacctcctatggcaaaattattacatatattttaccataaagaaggtactttttctttactttgtcaacaggtccaattaattacagtctcgatcaggcagttcaatactttcaggaacattataatcaaccactcagcatcaaagagtatgctgctgcccataacctaagtgaaggctggtttattcaaaacttcaagcaatatacaaacagcactcccgctcaatatctgctctctctgcggatacataatgcgaaagtgctcttagaatcaacaaattataatgtaactgagatttcaaatattattggatatgagaatccgctttattttagccggatttttaaaaaacagactggattttctccttccgaatatcggaaaaaaattttctctgaagataattccacacactccgttagcataatctctccagattaatttaacagtatctgtttttcaaatatacttacttatatcaattagcccactattgtccataatgcaactaatattttatctatcaaagccacatttttattgtttatctgctaaaatacatcaataatttttttcaaaacttttgatgtattttagcaaattgtgattatatttctttctctaaatcggccaaatgtaataattttaataatatcagtgcaaaattgtaagataaccatttagcatccagacaattacccgcaaaatattgactagatttatactctggatatctgaaatattctggattgcctccttcaatatatttacaatatttttcacagaaagtatccacatattccatataatcctcatcgattttttctacagcgtccagttttttatataattctttcaaatcatggtctttttctatttttatattttttttagtcatcaaatatttaaagcctagctcgatagcatgtcgtcctacataaacagttactattgaatctggcaactccgctacaagtttattaaatgcatttatatattctaaccaatatttttcccataataatattatatcttgctttttaaaatccttttctgttccattaaaatcatattgaacagcttcaagatcatcaatatgtccattttctgttaaactattctttcttgaattttgagccatattcttactatccgcaccgttaaatttaagcgattttccgtaattaatgtgacacgctgaaaacgctccatcaacttgtaaaatatctttataatttaaatcttttcccaactctttaaaaacattcatatctaatttctccttatctttttcccttattacttttttcaacataatcttccaaaataatccccctcttcatcacatattaaatccattttctaatgtttattatatatcctttttatttctaaacagaaaacgattccatctttttcctctattctctaaatctctttcgatactctcgcggtgtcatcctaaacctatctttaaacactctattaaacgttctttgactctcaaatccagcatccagatagatgcttgtaatatcttcattagaacattccaacattgcacttgcataattcaatctatgttcatttatatattgcttgaaatttttatggaatattcctgaaaatactcttgatagtgtaaatttattcacacccaattctttcgaaatcttttccaacgataaatcttctctaaaatgttttgctatataagataccgcctgataaacaatgtcattactttctacactctttttatccatgagtttcatttttccaagactcctggccagtaagatttgtatatacgcttgttctactgatcgttcttccaacacattttctgaagtattctgaatttcttccttcttttctttcgatatatttttttgttgcagtaatgcctgcaatacatattttatatctggatgtaagtcagccttttttataacaggatctactgggcagagattttgcaacgtgtccatataattgctcgttatcactggaagtgcccacacatagatagatttattttttcctttttcaaacacttgataatgatgaattacatccgggaaaatcacagcgaaatcaccttcgtccatatggaacagttcttgtcccataccaatttccatacttccacttatcacatatatgaattcaaccgaattatgcagatgtggcggtgcatgtctggatgttttttgtaatatatgtacattttcttttttctgctcgtatactgggaacattttatttctcctgcaatttttgtctactttttctattcttttgacacgcatctcttctttttctatattacaatacacttgtaacaaggataaataaaaaaataaaggaggacttcaaatgaaacttttaaaaggattaaaaaattatttcaataatgtaatttgtttttatgctgattattacaaatgctattgtcatctgtaaaccgatgacaatagcatttttcttttctctatttcattatttccaaattaatgtcatgtcaaattcaaaatgattctgattcaactgatatttctccgaaagtactggaccacagctattagatccgattccactctgtgcataatctagacatacaaccgtatatcctgatggttccagttcataactgtgttttttcttcgtcagttcttcctgtgtataagaagatacattaaacgaaaatggctgattacctatggctgtaaacactgtatttttattcttaatttccagataatcacagtctgtatggcttccattttcctgaggacgtaaataatcttcatgaagatcatctacttttgcagtgtaagtaccatgacttccggccctgcatttatcaatataactttcatccggtccaattccaaagtattctacatcgtcaaagtttctgttcatgaagaggcgaataccgaaccttggaagcattggaaattccatgtccttctctacctgcatatttactttgattgttccatcgcaagtaatttcccagtccgattttatattcaaaattctctgtaccgttggcgctactattgcagagacacaatgaatgattactttatgttctatttcttcataagttgtctcgtaagctctggaatagctctgattataatgcgcattataccattcttctttaatcttacgatcattgtccgtcggagctctccaaatattaaattccatcggacgctccaataattctttgtcttctttttgcaggctttcaaatactccactttgcttattaaagatatacagacactttggagaaccaataccaatcgtaagatagctgtccgtctctgtaacttccaatgacattaatactttctggttttccttgcaatcctctaacagctttttcactttctgattacgtgaatccgtattttctaacaaaatttcatcgaacccaagttcttccccatcatacatttgctgcgttgcttttttcaggtaatattttactttcaaataacacttgccgctttcaggaacatacagagggatttttattgtaccttcttcacctgccggaatactcttttctatttcggtgctacctgtcataagtgtctcaccatctctgcttaattcataatcaacataaaggtaatcttttaaatccacataattcatataattatgtaatgtaatttctcccgcttgttgatcaatcgaagttactcttgccggtcgataaatattcttgtattctttcaatcccgtatgtggtgttctgtccggatataccagaccatccatgcagaagtttccatcatggatttcttctccatgatcacctccatagtagtagatccgcttcccgttttctgcagtacctttatcaatagcgtgatcacaccattcccacacaaagccaccgcataaagaatcgtatttctgaatcagttcaaaatagtcctctaagtctcccggtccatttcccatagcgtggcagtattctaccagcagaagtggtttatccggctgttctttcatatattcatcaatttcatcaaacgcagggtacattcttcctacgatatcaatatttgtataatcataagttctgtctgtacttctataaaaggcgctctcatatgtcgtgagtcgtgtcggatcgaatttcttcgtccattctaacgcttcttcaaaggtacatccgtaagcacattcatttcccatagaccagataacaatacatgggcggttcttttcacggtatacacacagcttagtacgatccatcgttgccggtatgaaatccgggttattcgcaattcgtttattccactgctcaacgacattatcccattctgaattttgtaaatactgcgtctgcgttccatgactttcattgtctgcttcatcgattacaaagaaaccgtactcgtcgcagagctgataaaagtatggagaatttggataatggctgctgcgcactgcattaaagttatgctgtttcatcataatcaaatctcttttaacctgattaataccaatgacagaacctgtcaccggatcactgtcatgccgattcacacccttgaacttgatcttctcaccattcatgtaaataatacttccgtctcttgaaatctcacggattccgacccggtctgcaatcgtctctgcatcagagaacaagataagctgatacagataaggctgctccggattccaaagagttggattcttaattataaatgtagctttatgtgtatatccgttttcttccgccactcgttcgaaatgaccttcacttacggatgtaccatcttcattcttgagaagaatcttcatattttctgcaatatttccttctcctacaaagtttgcacggatctctatctccgcatcagttccatttattttagttgttgtaaaataatcatataatatattttccgggcgttttaagatgtacacatctctgaagattcctgtcattcggaatttgtcctgatcttccagatatgttccgtcacaccattttaataccaatactgccagacggttttttccatctctcataaactctgtaacatcaaattctgcagttgcatgagacacctggctgtagcctacatactgtccattcatccatacataaaagcaggaatccacgccctcaaaattcagatacgctttcggagctttttcctctttgctataatcaaattcatgtatatatgttccacacggattttcctgtggtacatatggcggatctaacggaatcggataacgtacattcgtatactggtggctgtcataaccataattctgccaaattccaggtaccgggatttcatcataggtttccgtcaatgtctcctcccgatagaactcctcctgtaagtcataaatacttttataatatttaaatttccaatctccattcagcaactggaagcgatccgacttttctctgtcatgaacaagtgtgcccattggttttgatgccggaatataatatgcacgatatggcattgtattttcatgaagcacctgaaggttttcgtaatagttaggtacgatcattcgtatgccctcctctgaattttctttatttttactgctattatacgttttcaattattaaattcatatacagcagatgttcgaaaatatgcataaaataacactgtctatttacatatggcggcccttttcccagaaccgccatatgtttatttcgttattccaatttctttttgaattcttaatttttcatttgctttttcaacatttaattgtgtcaataataatgctaccaatatattaataatcatcggaagccataaatacatgaaatgaagcatattaatacaagactgtgactgaaccttcaattgaccattaaatccgccaaaattaagtaaccatccaacaattgctgtaccaagtccactaccaacttttaaccccatggatgtacaagaatacattgttccatcaattctctttccatattgtaaaaatgtatgttctgaacattctgcaaccaaagcgtttaagttaccctgccatggcgccataccaatcgcaccaattgctgtaccagctaacatcaatggaacatttcccatatatcctgcaataattacaattcctcttcctgctgccgcaattaaatatccagaaaaattcaacttataatatcctttgtattttgctaccagcattggtaaaaatgcaagtcctacaataagagccaagttaatcgcacccgaaaatgttcctagtaattctgctttaccaagcacatatgtcatataataaattccacagtttataatcgccgaataagtttgtctgagaatgtcaaccacaagaatcacaatgtaatatttattatgtaccaacattttaattgattcaatcaagctgtatttttcttctactttttcttctccatttcgaagttcttcttctggcaattctttaactgaaaatacagtcaatgtatttgaaattaaacctataattgcataaataattgcaattgttctccatccttctgctccgccaccaagtttctgaaccaatccaacagtaatagtctgaataataaagcttgttccaaatgcaaacatgaatcgaattgatcccatttgtactctttctttgacattttttgtaattaaagccgttaatgtagaataggcgatattatttgctgtataaaatcccgcatttagcaacaaatatgtaataaaaaaccacacatactgagatgtctttcccattgttgttggtacagaaaatgctgcaatcaatgttattgcacatccaaaatatgccccgagcatccacggtcttgcttttcccatctttgtatgagtacggtcaatcattgatccaaaaacgacatccgatataccatccaataccttcgatgctgcaatcaatgaaccaattacacctgcattcagtcctacagtatttgtcaagtaaatcataatgaacgaagataagaatgcaaataccacattaccagctatatctcctgatccatatcctactttattataccattttaaatatttcttttcttccattgtcctctctccttgtcttcatttagcatttttttcttacggcctctttcatcggaagtcccgtatcataatccaactgtctcggttcatactcttcattttctctttgccttgtatatccttcattttcccaatttggaacgaagtcttttctccatggacgcattctccactgatatcctcgatataaatctcttgtatcattcatatgttgaattaatttatcatgcaacgcattgcgctcctccacataattttcatcatcaattaaattatttatctcatatggatctttctccatatcataaaattcgtctgaatccaacaaatgaattaccagtttataccgtttggatatagcagccctcataatctgtaatccaccaaatccatcgtgatcaatttcatatcttgtgaactccgtaaagatcacatcgttaatttctttttctggattctcaatctgtgaaagcatactctttccttccataagtttaggaattggaatatcaaaatagtccaatatcgtcggtgcaatgtctatatgagatgccattgcttcttctacataccccttggctccacctttgataatcaacggaatatttgcaacctctttgtacgctgcagcatttttagaaaacaatcgatgtgccccaagcatatctccatggtctgatgtaaaaattacaagtgcatctggtgcaacttcccgtattttatccaatactcttccgatttcataatctacatatgaattgcatcctaaaaacagtgataatccatctgtcggtcgattaatttcatcttctgttgcatgtaaattcttaccagaccaaagtctttgcataaatggttttttagaaagatcatcctgaaaattaggacaactatcaaatttaaatccatcatacatatgattataaggtttcgggcaaagtgatggtccatgcggttcgtcataagatacacttaagaaaaaatcattattttgatgcttttctaaatatttgattgctcgattagaacaacgatgtgcgtatgtaaactcttccgaaaagtcatccttataacattctttagggtttctggattttactttttcttcgtcagttaattcgtttaaataagttttcatgtcataccagtattctgggtcccaaccttctggacaacgcccatttccaaaataatcagatccatccaagtgccattttcctatataaccacattggattccatgatcatataacctctgtcctattgtttttacattatcacccaatgcaatgctattcgttaccattccattggtatgcgggaatgtaccagtaaagattgcacttcttgccggaccacacactggctgacatgtatatgcattttcatatcggattccttcttctgctaggcgatccaaatttggagttttcattttaggatatccataacatccaaccatgtcttttctggttgtatcagtcatcagaaatattacttgctttctcatattctatcctccttgattttcgcaatatacttaattctgcttttgctcatctgcttgacctagtatattcctatattttcgccatttctatgtcaaattatgcgtttaacatggataattctgcttttctcaatcattttttttctaatgcttgctctttaaacaacatttgattatgatgatagataaggcatactgtattgtttttttgtcgcctctagctggcagaatggagatttttatgataaatgtatcaggacatcttagaaacgaacgaagagccactggatttgaagatctttctacagcactcactgtaaactgttgtggtatgcagattttcaaaacaaaggactataaacaaaatcgagcagcaggacgagtagactatcaactaatttatatttataagggtgccggacactattacattcatggaaagtggaaatctctcagtgccggaaatgtccttctgtttcgcccaaaggaagcacaaacctattcttatttttttaaggagcatcctgaaatctattggattcactttactggttacaattgtgaaaaaataatccaaaaatacaatctacataattgttacatcggcgaacatagtttactgaaaacttttttccaagaggttatcattgaattacaattaaaaaaacctttttttgaagatatggtattaagcaatttttggcagattcttgccacaattgcacgatcccatcaacagattctttccccatttggaaatgatttttctataaaccgtcttgtaattcaactaaatcagacgtatatggatgattggaatgtcgaatccatggctgaatactgtaaattaagtgtaggatatttctcgcacctatttaaaaaaagaatcgggagttctcccatgaagtatttaacagagcttcgtatcgaaaaagccaaagagttaattgctactaattccatgagtttgtctaacattgcacaaatgaccggatttaatgatcctttatactttagccgagtattcaaaaagactaccggaatccctccaaaggaattccagcagtctttactcacaataaatacaccaaactggtgggatgaataaacttcactccacctttttaattaattaaacgttgcccattttatctataatttactctatcacctagtttcagaatctcttcataacaatgttcaaaaaagatttgatagccttcacaaaaataattcaaatattccttatctcctagttctcggtttcgcatacaccctcccctgcacaatctgtaatatgtacaatttttacatttttgattcactctttctgagcattctataaatcccacttccttacgcttctcatctattttcgatataatatctgtatttaaatttccaagataaaatttatccatcacaaaaaaatcgcaaggatatacacttccgtctgcttctaccacatattgaactccacattttccccgctgttcacaagattcagccatatatcccgctgctaatcccacataattttcaaattgtcttatatatggatgacatccttcttgcaaatctttataccataatttaaataattctactaaaaattttccatattgttctggcaggatagagtaagacattttcccgtgttcttcaccatatggatccagacaagcaatatattgttggtaatgccaccctcgttgtttataaaatgcataaatggattttatattcttagcaacttttggagttactacagtcaaaatattatattctacgttatatttatctagcaattttatatttttattaatctgttcaaatgttccatctccaattttattatgccgtatcgaatcatgtatttctggaaggccatctacagatacaccaacaaggaacttgttttctttaaaaaacatgcaccaatcatcagttataccataaccatttgtctgaaatgcattaataacctgcaagtgatttcgattgtattttttttgcaaataaagcgccttacgaaaaaaatctagtccgcgaagtgttggttctccaccttgccaggtataacttacacttccttccgaatgaagcattgttctcctaatcatattcttcaatgtttcttcgctcatcattccataaaatttttgttctctttttgcagcttcatcacaataaaagcaataatcacatgtcatattacatgcacctgatgccggtttaattagtacgcttatatttttcatcctatcctccaataaatgatattccaaccttcataatgcctgccaaagccataaccccgattggattcatttttaccttctgtaataatacaacacatatcataaaaattacaacaagagtccattttgttccaaccagcgatatcattcctgtattcccccaaaaagctgtaatcagaattgatatgccagccgctgcaatcatcgccaccactgctggtcttagagaattcaatattccttgcaaagcagccatattccgatatttcaaatacagtctagcaattactgtaacaataatgcacgatggtaaaatacatccaaatgttgcaactaacgctcctagagttccagcaatctttgttccaacaaatgttgccgaattcacggcaatcggtcctggtgtcatctgggaaattgttatcaaatctgtaaattctgacatactaagccaatgatgcaccgttacaacctgccctctaatcaacggcattgccgcatatcctcctccaaaactaaataaaccaacttgcaaaaagcttaggaataattcccaataaatcatttacatcctctccttcccgataacgcatgtccgaataattccaattattccagatataatcacaatgaaaattacattaatattaaaaatacaagctgctataaatgcacctatcataatcaatacagataccacatcttttttcgaaattattccagctcccatttcataactaacagaagcaatcacagcaccaactcctgcctgcattccttctagcatctgacttacaaagtagttactacgaaatgcattataacaaaacgatattatggaaataattagaaatggtggaatcactgtcccgataattgcaactatagttcctaatattcctgctaatttgtaccccactactattgctccatttaccgcaattgctccaggtgatgactgtgcaattgccactaaatcaagcatttcattttcctcaatccaatgatagtcatccacaaacttctttttcatcaacgtaacaattacataaccaccaccaaaagtaaaagcactcagatataatgttgaaataaatatcttccacagcatcttcttcttattttttttctccatcttctttccctttcctttcatcgctttttagtatattcttgcttgacacttatgtaaaatactattattatatacaaaatataatgattttattatatatttttaaggaggaaaattatgacattacgacatcttcatatttttgtttcagtttatgaacataagagcataaccaaagctgcaaatacacttcacattgctcaaccctctgttagtcttgcaatcaaagaattaggagaatactatggagttcagttattcgaccggattggtcgtggaattactcccactgaagctgctaaacatctttatggttatgccattcatatcgtctcactatttaacgaaatggagcaacatataaaaaactgggacaatatcgggactctacgtattggggcaagcatcacaattggtactcatattcttcctgaactgatcaaagaatatcaaaaacataatcctgatcttcgccttgaagtcattgttaataagtcttcagccatcgaacaacatatcctcgataataaaattgacattggtctaattgaaaatcagtccgaacatccagatatcattttgcgaccttttatggaagacaaactttgtgcaatcgttccaccagactcttccctagcttccaaaacgtctattactttagaagaactagccctacacccgtttctcatgagagagaagggaagtgctggtcgtgaaattttggatgcatatttttctttaaaagacatacacatccatccattatgggaaagttccagtactcaagcgattgtacgaggtgttgcaatggggcttggtgtttctgttcttcctgaaatgatgattaaaaaagatatcctggaacaccgtgtttcatatctatcttttccaaaacctctaaaaaggaacctaaatcttattttgcatcgaaacaaacacttgacaaaaaacatgaaatcatttatcgaatattgtatgttatattcagaaaaataggagaaacgatgtaatccaccatttctcctgtttttctgaattcgtatgactttttcatttcttaaattcttttacgataataatatctttattatttttcgtatccattcggattctgagactgccatctccatgagtctgcacacatctcatccagtcctttttcagccttccatcccagaactcttgctgcctttgcaggatctgcataacacatcgcaatatctccggctcttcttggtttgatttcataaggaatctcttttccgcaagccttgctgaatgcttttaccatatcaagtacagaatatccgacacccgttccaagattaatcacatccaatcccggattactgaaaatatagttgattgcttttacatgtccctttgcaaggtctacaacatggatataatcacggactccggttccatccggtgtatcgtaatcatcaccaaatactccaagcctctcaagctttccgactgccacctgtgaaatatatggcatcaggttgttcggaattccctttggatcctctccaatacggccgctttcatgtgctccaaccgggttaaagtaacgaagcaggataacattcatatccggattcgccttctgtacgtccgtcatgatctgttccatcatagattttgtccatccgtaaggattggtacactgtcccttcgggcactcctctgtgattggcatctcttctggacttccgtatacagttgctgatgaactgaatacaatattcttaacacctgtctgtttcatcacatccatcagtgtcagggttcctgttatattgttacggtagtactctaatggcttctgtaccgattctccgactgctttcagcgctgcacagtggattactgcatctacgttttctttttcaaacatttcttttaaagcagcttcgtccattacatctccttcatagaatgtaatgtgctttccggtaagttcttctacccgttttaatgattcttttgatgaattgcaaagattgtcatatacaaccacttcatatccttcatttaaaagttccagtgctgtgtggctaccgatgtatccggctcctccagtgattaatatcttttttgccattatagtacctcctattttttatttatctaaagtataagaatattcccattagctgtacatacacaaagtacaggaaaatatatattatcttctcttaaattcattccctattctcttcatgtctatcctctgtattcccttgtgtatctctctgtatctaaagggaagataagaggtatctctatatcttatttctttcttttctttttcttttctttctatatacttataagttttcgttacccgtagcgggttggccacggaagtagtggccttctccgtaagttcccggctgcgtccgctgtccgaatcgccgttctgtagaaccgcatcccttagatggactcacagccgaaagcgttccagcgtccttccgctttagccaaggcgttcggccagctagggaacgcctactagccgcagacaaaaaaacatagttatcttgtatgcagctaataggggttcaacagtaaggaaaatacggaggtccacacagtaaccttccttcactctacatgccctcgtaatcagctttccatttgtttacagctggtcttccttcacccagggtaaaataccctcatgtctattccaggcctggcaatttatctgctcgtcacagaacggttgcgttcaccgtcagcattacctagcaggagggtcccctgaatttgtgtgctccattacttctcatttactaggatattagtgcgatttttcccgcggtagaaatgccggaatgtggctcgcaacaccggatgtcagtattaagttctaaggggtaatcatttttctcttttggtaactcttttaaaaacacttttacatatattagtatgtcagaaacgttttgtaacttttgcattttataaattctatctcttttccactattatcatctcctcctttatagtagtgtaagattctttctacaactcctatttctgaacaaaatttttcaatccaatattttctccatatttcttttgtacagtaaaaaatctcctacatgtagtagtatgacagaaacgttttgcaacttttacatttttacaaattccatctctttgagacagccatcatcttctcttttatagtaatgtcagattctttttagaactcctgtttctggacaaaattcttcaatcccttcttttcccttattttttttcgtacaactttcaataactgttctttcactattatcgcaatatgtatttaccaataattatacgccaaacctcgttcacctttctgtcactactatatatgaggggaaactatcattgaaaggagttgtaacttttaaaaagtgcaaaacaaattccaaaacccggaactaacggcagaacaacagaatttgtacaacacgatcatcgccttgcaatcattaatcgaaagtgctacattaaacacagcagagatgtcgcaatacacggacatgacatatgcaaaaaagaaaaaactagtcagcgaaatttatttcaaagacaaaaagcgcaaagagttctatgcttgcaaagacggacgatataaatcttataatccacaatttattgcaccatcagaaaaagagctggtgcagaaactctatgattactacttcaataacacattagaagatatctacaagcagtgggtgcagcatcgtgcagaaacccaaatcgtatctcagaaaacgattgaagaggacatcggaatttggaaccgattcattgcagatacagaattagcaagaatgcaaattgcagagatcaaaccagtacatgtaatgaaattatttcaaatttggaccggaaacggaaagattaccagaaaggactttaacaaccgtaagtctgtactaaatggcatctttcgtcatgctgtgctaaatgaaattattacatttagtcctattaccgatcttccttgcaacacattaaagttcaaattgccaaatgcttcaaaaaaagcttacacagtagaagaacgtgctatgctactgtcttatctaaagactttagagcaagatgcctacacacttgcaattcaattcgcgttttatggaatttttcgagtcggagaaatcaaaggattaacttgggatacggagaacgaaaatattatcacaatcaagcagcaattggtagaagaacgtacgttacaagaggatatgactttcagtcatcctcatcgtgtcttaaaggatccaaaaggcaatcccttttacagtatacgtaccgaagaacttccagaagctggaattaatattctgagaaaaatgaaagagcttaatccaaatggaaagcttgtattcatgcacgagggacggccgcttactacagatacgtttaaccggcgtttaaagaaatattgcggtgaactggggattacatatctttccagccataaaatccgctttaccaacgcctcgatgctttttgatgctggtgtaaaagcaattgacatccagccactcttgggacattcgaatcttgcgatgacccagcactacatcggacaacgtactaccgaacgagactcaacagaaatggcccgaatactggcctaagccctgtaaatactgcctgtacaactttgtacaactttttatgtaaaacaaaaagtgcctcaaaccctataattataagggtttgaggcacctcaacctaatgccgcagaccggaatcgaaccggtacgggaggttagtcccgcaggattttaagtcctgtgcgtctgccagttccgccactgcggcattccagcatcagtcacattttgcaactgaactatcttaaaatctgcaacaatctcttgttgcaaaatgggaccaatagggctcgaacctatgaccctctgcttgtaaggcagatgctctcccagctgagctatgatcccatatgtaattgtttatcgcctgctcactaaaagtgacaagcaagcgacccagaagagactcgaactctcgacctccgccgtgacagggcggcgctctaaccaactgagccactgggccattcatggaccttcggggactcgaacccaggaccgatcggttatgagccgattgctctaaccaactgagctaaaggtccaaaatctttaagtcccgtaaggactaagccgatgatcggactcgaaccgataacctgctgattacaaatcagctgctctgccaattgagccacatcggcatttacctaattgcttaggcagtgactccaacgggaatcgaacccgtgttaccgccgtgaaagggcgatgtcttaaccgcttgaccatggagccatatctcagtcactgttttgtgttttttatttctcttgcgtgaccgagatttatattatcataacacaataccttttgcaagtgtttttttgaattttttttatttttttcaaaaaaacttatttttgcgtattttctgccattttcagaagtgctctattcttctatttcgcgctcgtcattagcgactctttcaatatgcatcgccaaatatcctgtctcgacttcttctaatttcacaccaaggctctcacctacctgatcacagactgcctgtgccattccaaacgattctggaaatttcacttccatgtaatcattcatattcaccttcagcttctcaccgcttaaggctcttgctaccatataacggatatggttcatcagacggttataggataacgatgcgatatcgatcggctttccgattgcttcttctaccatgctgatacactctctgacagatcttgccatctgcatcgcctgcgatactttctcatcctctatcgccgaatgaatgtgaagagccacatatccaacctcatcatcttctatatcaatgccaaactgcttttgaagaagcgggcggatactttctgccgctttgaattccatgtgaaataatacacggatatcctctgtgagcggattactgatctgctcatgattctgaatacgttttactgcaaatgcaatatggtctgcaagcgggaacaataccatacggtcaatcttcccgaatatcttttccgcctcgtcgagcacggcattcgttacttctaagaattccggtgcgatggactttacgatttcttttgccccgccccgttctttatatttttggagagaatataaacggtcttctggtcttacttcgattctttctgcaactttcctgccgaatccgactccctttcccatgatcaggacttctttgtgatcatcctgatggatggccattacagtattatgatttaaaactttttctatcctgtacatcatatccccactcgcatttccacattagattcttttacgcttcatagatatcaatcgcgaaaagctcatctcctgccttgatctcaccttcattcagaagacggatcttctggttgtcttccagctctgtgcagagaaccggtgatgctacagacggtgcattctctctcagataatccagatccaacttcagcatcggatcacccttcttcactgcctgtccgttctcaacgaagcactcgaatccttttccgtccagttttaccgtatcaatgccaacatggatcagaaggcttactccggattctgtcatgaatccgattgcatgcttggtatcgaatacgaagcatacttctccgtcttccggtgctcttacgatcgcatcttccggtgtcacaacagcaccgtctcccatcatacgtccggcaaatgcttcatccggcgttgtggaaagatctgccgcaagtcctgtgattggacttgagatcacgattgtatctactactttcttttctcctgccttgtcttctattgtagcatcttctgatgcattctgaccagtactttctgtatccttctgtggctcatacagctcttttggcgcatgttccagataatcttccaggtccgccttaataactgtcacactcggcccgtaaatgacctgtacgccctgtccacggtgtaccacgcccgatgctccggtcgcctttaagattccatcatttaccagatccggattgcttaccgtacaacgaagtcttgtcgcacagcagtctacatcttcaatgttcgcagatcctccaagtcctcttgtgatctccgcactcagtgaatcttccgaaccagctgttgcaccatcttccgtattgcctgcttttctcgcatttacatctgcttttgtataaagctttgtctcttcgtcatcatcttcacgtcccggtgtcttgagatctaacttcttgatcaggaatgagaagataaagtaatacaggaagaaatagataattcctaccggaatgattctgatccagcttgtcttcgcatttccctgaaggataccgaataacagaagatctaagaatccaccggagaatgtaagtcctaccgcaatattcaggatatgtgcgatcatgtatgcactacctgccagtaccacctgcactgcaaaaagaaccggtgctacgaacagaaaagagaactccagaggctctgtgatacctgttaacatacatgtcagtgctgcggaaagaagaagtccgcctgctgcttttttcttctctggttttgctgtacggtacattgcaagtgccgctcccggaagtccgaagatcatgaagatgaactcacctgagaaatatctcgttgcatctgcgctgaaatgcgtaatatgtgcagaatcagcaagctgtgcgaagaagatattctgacctccctggatcagctttccgccgacttccatcgttccgccgacagctgtctgccagaatggaagatagaatacatggtgcagaccgaatgggatcagtgcacgttttacaataccgaagatcagtgttccaaagtaacccgttcctgttaccagaccacccagtgcatagataccgttctgcacgattggccatacgaaatacattgcgattccgacgaacatataagtaatcgttgaaatgatcggtacgaatctggaaccgccgaagaatgataacgcattcggcagtacgatcttgtggaaacggttgtgaagtgccgcaacaccaagacctacaatgataccgccaaacacacccatctgcagtgtattaattccacataccgaagcaatcgttccttcaagcacattcttggaaatggttccgtctgccgcgatcttaccactgatttcaagcatactgttaatagaaatgtgcataacaaagtatgcgatcagtgcagataacgctgcaacttctttctccttctttgccataccgatggctacgccaacggcaaagataagcggaaggttgtcgaaaattgcacttccgactttgttcatgatgatcagcagcgaatgaagaagtgttccttctcctaagattccctgcagtccataagttgcgatcgttgtggcattggtaaaagaactaccaaggccaaggagcaatcctgctaccggaaggattgcgatcgggagcatgaagcttcgccctactctttgcaatacgccaaagattttgtctttcatagtttttctccttttctttgtacaggtatctatgcatagtgtaggctcttttgaagatgctatacgtgatgatgattttcacatcattataaatacaaaaaagaggcactaactctgcataaatattactaatttatacatagttaatgcctcgttcactaacaagtaacatactatattaatataatatcaccattcacatattctgtcaatccactcatttattttttataactttctcaccgaatttccgtcatttaattttgctggaaagcgatatgcataattctttgtctgccagttctcatcatccatcatacgcagcagatgatttcccgtaatccgccccagcttatttttcggatgtatggcagagagcaattttatatctgtcgtatcctgtaattccgcatcatcaaaggatacaacagacagatcttccggaacatgtattcccctttcttccaggaactccagatacacccatgcgacttcgtcattgtagatcagaagtgctgtacactccctggtatgacggtaaatatgtgcaagtccttttttactgaacttatcttccatttctcttgtggaataccagcggatacagtcgtcatcgtatttgatgccataatcggacatacactgtataaatcccttataacgtgcaatcccctgcatgtcatcatatttcaggattcctccaattttccggtgtccatgttcgatcaatatcctggtaagttcatacgctgcccgtgtatcggacgtttccacactgtcaaatgccatattttcataatggttatgaataaaaattgtagggatatttcttttcttaatctcttcatacaaacggatattcgggttcggaaatgcagagcgtgacccttctatgatcagtcctgatacattgttcttaagcattccttccagatacgctgcctcatcattcagacgattcttggtaaccgctacaccaatccgatatcctttttcgctcagggatgattctattccgtcatatacctctggaaagagatattcggaataatagctcaaaagtaaccctacctgcggacggttgtcatcaatcaactgtccctcataagacacatacgttccacttcccctcacacgggtgatcagaccttcttcttccagctgctgcagtgctgtccttacggtctgtctggaatagccaaatttcttctgcagactcgtctctgaaggaaacttatccatactcttgatcactccactcgtgatcaaggtatgtgcccagttatataatttttgatattttaagccttcctgattcgtgttcttcataacctctccatataccaattacgggcaaaaacatcaaagaatgcctttgcccgtaatgaataaataattttattatttgataactgtaagtgattcacggtctgcgaatactgctacgaagatcaggaatacaactccctggatcagctgcatcatctgtgttgagaatcccatcattgtcagtccactgttcagtacaacgtaaagaagagatccgacaacgatattttcaaatcttacttttgctccaccggaaatcggcataccacctaataccagtgcgatcaggatctgtgtctctaactggttaccaccggaagatgtaacagatccgaccttgataacgttgataaacgctgcaaatcctgtcagtgcacctgccagtacatacatgaggaatttcattctgtctgtacggattcctgagaacattgctgctttttcaccagctccgatcgcttttaaatatgttccgaattttgtataacggaatgcgataaatccaataaccagaacaactactgtacaagccactttgaatcctgtactgtcataattgatcaatgttgcagaaccggaaacaggtgcattcgttgtcatatatttgataaatccacggaataagaacatggtacaaattgtaacaatgaatgatttgatcttacggtatacgtagaagtatccgttgatcgcaccgatgatcacacctgatgcaataccaccaagaattgcaattgcaattccatgttttgaaagaatacatacaacgattgaagcaattccaaggatagatccctgagaaaagtccaggccgcccatcgtcataatgaagaatacgcccatagctgcaatcattgtaacatatacctgcgagaatgccagtgacatatttcccatcatacggaaatctgtcaggacattgaacagcaggaaaataacaaccaatcctacgattggcaggagcgcacgaaccatcgccatcttagacgctttcttaagctgctgctccttatcgtttgtttttgcacttacttgacttcccatagttgcctccttataccatcatcgaaatcagaccattttcatccaggttctgattacgttcaagttctccactgatttttccatctttcataataatgatacgatcactcataccaatcagctccatcaactcttctgagatcatgatgatggatttaccgttctttctcatctggttcatcaactgatagatgtcctgttttaccttaatatcgattcctcgggtaggactgtccagaacaacgatatcagaatcttttccgatccatcttgcaagaacaactttctgtttgttaccaccggacagatttgaaacgaactggtttacatcattcatctttacagacatctgttttgcatatttatcggcaaactctctacgtttcttatcgcttaatatatgtgctttattagcaagttcatctaatgatggtaagcagatattgtcaccgatactctgattcagcacaaccgactcattgtcacggtctttggatgtataagcaatgctgtgcttaattgctgtaggaatatcgttgatgtgtgttccgtcagccagaacaacttcaccttctctgtcataagatgcaccgaagattgctttaccgatctcatgcatacctgattctgacagaccaccgaatccaaggatctctcctttgtgtaaatcaaagctgatatcttcgatcagtcctggaactgtaacattctttacggataatacaacttcatctgatactttttcaccatagtctgaacgatagtaatcacctgttacctcacgtccaaccatcagcttcttcagatcatcttcgttcacatctgcactcttaaccgtatcgatatatacaccatcccggaggattgtgattgtatcggatttgtcgagaatttccggaaggtcatgggaaataaagataaccgtatttccattgtcacgaacacgattcatctgtttatacagttcttcacgtccttcctgcgaaagagcagttgtcgtctcatcgacaacgacgatcttaggattaaaatatgtagcttttacgatctcaaccagtttacggtcttcgaaattataatcatcaatcatatctcctgctttgatcttatcaaatccataggattgtaaaagctcatttgcttttttgttcattgctgcggtattcttgatccccagatgaacgaactgatcttcatgtccaaggaagatattctctgctaccgtcagtccggaaagagttccaagttcctgtacgatgatagaaataccttcttcatttgcttctacctggttcttcggatgaacttcttttccatccagaatgaactgtccactttccagtgtatagattcctgtcaacatatttgtcattgttgatttaccggatccattttcaccgatcagtgcgtgaacctcacctttattgatattaaatgacacatctttcaacgccttcgtgataccgaagtttttagaaacatgttttacctgtaatctcacttcactcattgctgtcttcctccttctattacttgacaatctcgccttttgtaacctttgttgtcagagtaacgataatcagcagtgcaaatcctgtaataacgtcctggatcgctgtaggagcaccaagtgcgatgaaaccgaagaaaataatattgattacgaattcaccgatgataatagcctgcagcggcataccatatttcttaaatgccagaccgaagaaacatcccatagtcggtacgaagtttcggctcatagatgccataccggtaaccgctaccattgaagaaccataactgattgtcagaattgccattactccaaggaatgcaccacttaagatgaatgcaagtaccttgtatttattaacattaatacccatgttcttggcaacgaactcatcactaccaattgcataagtataagttccgattttagtgtagtttaagaatatgtaagcaacaacgcatgctaccaatgcaaggataatatcccaaggcatacgtccgaatgctcttaagtgtgccggaagtgtctgttccacaccacctgccatgtagtttgctaacgactcatagatgagcgccagacctgttgtaacgatcatagatggaattcttaattttacatagaagattccgtttaataaaccaacgatagtgcctgtaagaatacctccgacgatcagtccgaaatatcctaaattaaattttgttgccaatacgcaaccaacgattgcggaaagcatgatatttgcaccaatagagaaatcgaacattcccattaccattacgaaatagaaaccaaccgcacctacagtggcaatcagactggcctgaaagtaattgagcatattggaaaatgagccgaagttatgtggtgtcaatattttaaagattacccaggaaacaattacaagaccgatcaggattacatatcccattgtctttcctgagagttttttagtagtgcccatattatctacctcttcttattatctttttaaaagggaaggtggcatcgcctttcttgcgacgtcaccccccaaatcattttctgttatcttgcgtccggtttatttaccagcacggctttctgcatcagcgatagatacgcttgctgcagttgctttcagctctttcagactttctttagacatagctactaattcatcgtctgtgtatggaagctgatctacgaaatatttctcatatgctgcatagtcatctgctgatgatacatacaggtatgggaatggaacatcttcgaatttaccagcgaagtctttgtagttacctttgactgcattgtaaaccatcatgaatgcgatcaatgggtcacagaagtgtccaccggattcaccggccattgatccattctgaagtctttctccaaggtctggaaggaagtctgtagaaacgatatcgatgtcctgagtctttcctgctcgttcaactgctgcgattgctccctgaagtggatctccaccaccaccagctgggatcaatgcatcaagcttaggatctgctgccattaaagcttcagcggcttttgatccaccttctgaagttgtaccagcgtactgtggctcagaaatttttgctttgtcgtctgggttttctttgttccatttttcaactccggctttgtaacctttccatcttccgagccatgtagcatctccctgctcccagccgataagaccgatgttacgatcgcctttatcaagaaggatcttaacaagttctgcaccgtttgcaggttcatcttcatgaactgctccgatgtagtaagcggaatcttttgctgctttgtagatatctgcactgtcttctttgctgattacacggaagaactgtgcaagatatactttattatcattacatgtcttgattgctgatgtcatctctgtatcagatgagttacagatgatgattccctggcatcctgctgctgctaactgctctacagaagctgtaactttctcagatacatgtccctggtcaacatactgtacttctacatccagtgctttagctgctgcatccagcatcttcttacactgtgatccaagaacgtctgttgaagaccagatagaaactccgattttaacctttcctgatttgctgctcttgttacctgagccaccattgccgcttccacatgcagcaagtccaactaccattgttgctgccagaagagctgctgttacttttttgagaactctcttcataatgtctcctccgttttctatttatttgatgattcaattatatacttaacctgtccggtttcgcaataaaatacaaccattttttcccacaaagttgtatcgttgcaagttgttttccattgcttttatgtgtgtttttctatctttttgtgcgttttgacagtcttagccgctataattgtgaacaaaaaacgaattttttgtgcactttttggctttttcttcatattttctttagaaagcaatacaactttcatttttccatttacttgtattgtttttgacaaatatgtcgaattagattgtattttatttttcgttcgctctaaatccttttcgaactaaatccttttattatatgtagatacttctcttcctttgtatttttatccgtacatccatatcaaaaacttataatcttaatgcataattgctattttacgtattgttcttattatgatatcctacatttggttaaataattaacacaaagtttttatgaaagaggtaagaatatggaagacacaaaaacatgtcttgagaagcagccgttatctcaggaaatgcttgaaaagatgaatgcttactggcgtgctgccaactatctgtcagccggtcagttatatcttcttgacaatccgctcttaaaagagccacttacaatggatcagatcaagaaaaaaatcgttggtcactggggaactgtcccaggacagaactttatctatgtacactgcaaccgtgaaatcaaacgttatgatctggatatgatcttattatcaggtcctggacatggcggaaacttcttaattgccaatacatatctggaaggttcttacagcgaagtatatccgaacatcagccaagatgaagaaggtatgaagaagatgttcaagcagttctcattcccatgtggagttccgagtcactgtgcaccagagacaccaggatctatcaacgaaggtggagagcttggatactctatcgctcatgcattcggtgctgtattcgacaacccggatctgatcgcaactgttgttgttggtgacggtgaagctgagactggaccgttagctacttcatggcagtctaacaagttcctgaacccagttacagacggtgctgtacttccaattcttcatttaaatggatataagatcagtaaccctactatcttctctcgtatttcccacgaggaagttgagaacttcttcaaaggatgtggatggaaaccttacttcgtagaaggcgatgatccgatgacaatgcacaagaagatggcagaaacaatggatactgttatcgaagagatcaaagcaatccagaaaaatgcacgtgagaacaatgatccagaacgtccggtatggccaatgatcgttctgcgtacaccaaagggatggactggaccaaaggttgtagatggacagcagattgaaggatctttccgtgcacatcaggtaccacttacaatggaaagtccagaacatctggaactcttaaaagagtggctggaaagctatcatccggaagaactcttcgatgaaaacggacacctgatcccagaacttgcggaacttgctcctaagggagatgcccgtctcggagctaacccacatgcaaatggtggattattattaaaagacttaagacttcctgatttccgttcttatggaatcgaagttgaaccaggtaagacaaaggctcaggatatgatcgaacttggcggatatatccgtgacatcttcgaattaaacgaagagaacaagaacttccgtatcttcggacctgacgaaagtatgtctaaccgtttatacaaagtatttgaaacacagaaccgtgactggaatgccggacttcttgacacagacgattgtcttgcaagaaacggacgtatcatggatggtatgttaagtgagcatatgtgtgaaggatggctggaaggttatctgttaacaggacgtcacggattcttcgcaagttacgaagcattcatccgtatcgttgactctatggcagctcagcatgcaaaatggttaaaagtatgtaaccagctttcatggagacagccaattgcttctcttaacttcatcctgacatcaaatgtatggcagcaggatcacaacggatttacacatcaggacccaggattcctggatcacatcgctaataaaaaagcagatgttgtccgcatgtatctcccaccggatgctaactgcttactctcttgcttcgatcactgtatcaagagcaagaactatgtcaacgctatcgtagcttcaaaacacccaagctgccagtggttatctatggaacaggctgttaagcactgtacacagggtatcggtatctgggattgggcaagtaacgactgtggtgaagaaccagatgttgttatggcttgctgcggtgacacaccaactcttgaaacaatggctgctgttacaattcttcgtgatgaaatgccagaactcaagattcgtgttgttaacgttgttgacctgttcaagatggaatcagatcacaaacatccacacggattaagtgatgcagaatatgatgcaatctttacaaaagataaaccgatcatcttcgcattccacggatatccgacactgatccatgaacttacatacgaacgtaacaaccacaatatttccgttcatggatatcaggaagaaggaacgatcactacaccattcgatatgcgtgtacagaaccagatcgaccgtttcaacctggtaaaagatgctatcatgcacttgccacagcttggcaacaagggatcattcctgatccagaagatgaacgacaagctggttgagcacaaacagtacattgccgaatacggacaggatcttgaagagatccgtaactgggagtggcataaataaaaaagtcctctattgattagtttgttttaatataataaaagcccggaagcttacactattttactccaattcgatacctttatcttttatctgatcattattgatcgtccgaatttatgtaagcttccgggtttttacatttctttttctttcaggaatttctgaaattcttttgccgcgatactttgcggatattccttgtcgtagattagtatgatattacgttccggcagcttttctttcactttgatctcaaatacctgtccggacttaagttccgaatctgcaaattccgccgggatgaaaccaagtcccagattatgccttaccgccggaagtatcatatccgtcgttgcaagctccatatccggtgtaaatgtcagactgttcttttcaaaatattcatttagaaaacgtctggtaatcgtctctgcagtcagactgatccacggataggacaccagttccttaagtgagacctctttcccatcatcctttaattctccaaatctgtttccactgatcaggatatcatgatattttctcagaatcttcatccgaagaggttttgctacctgaaggttcgccgatacaaatgcaaggtctacttttccttcttttactgcattcaccgactctgtcgtactgttattcagaatcttaaacctcacattcggatacaggctgttgaattcttccattgcctgaaaaagataacagtgaagtgccgtctccgtagcgctgatatagatcgttccgttctccagcgagatcagattactcagatcattctctcctttgaaaaactgggcacatcctgccgctacatatccataaaatgtccggccttccggagttagctgcattccagtcttactcctcgtaaataagcggcagccaagttcattttccagtttgtgtatggtacgcgtgactgccggctggctggtcttcagtaccgttgccgccttggtaagattttcatattttgctacataataaaatattttgtaatattcaaaatttgaattcataattaaaactactcctcttcatctctcactatattttaaaaaataagtgaaaaatgtcaagtgatatcttccttctccaccgctgtcaacttttcttatatacttttacatattccaaaagagatctgacatatccaaatgccaaatctcttttttgttcttattaaccttttacagctccggctgcaacacctttgataatatgcttctgacaagccagatagaagataactaccggaattaccgcaaggatcaacgctgccataacagcacccatatctacacgtccataacttcccttcatatactggatcgcaattgagattgtcttatacttattcagatccagtaccaggtatggaagcaggaagtcgttccagatccacatcgtctccaggattcctacggaaatgtatgtcggcttcatgatcggaagtacaacggagaaaaaggttcgaagtggtgtacatccgtcgatcattgctgcttcttcaatttccagtggaatggattttacaaatccgcagaacatgaatactgcaagacctgcaccaaatccgaggtaaatgataatgattccccaaggtgtacgaagaccggtacggtcagctaccagcgataaggtgaacataaccatctgaaacggaacaaccatggaaaatacgcagagtaaatataacagttttgtaaacttactgtttactcttgtaatataccatgcacacatagaagtacatacaaggatcacaagtacggaaccaactgtgataaatacagtccagccgactgcactcagcagttcatatttgtcaattgcggacaggaagttatcgattcctacccatgtctgctttgtcgggagtttgaatggttctttgttgataaatactttatttttaaatgagttgatcagcacgatcaggatcggcatgatatatacaataccgatgatcgtaaatgcacctgttccaaaccagcttaatttacttgtctttttcttcattactgctgtacctccttagaacgtgttgcacgtaactggatcataccgatcacaactacgattgcaaagaagatgactgccttcgcctgtccgactccttcccatccggtacgtccatagaacgtattgaagatattaagcgccatcatctcagacatcttagacggttcaccggctgtcagggacaggttctgatcgaataacttgaatccgtttgtaattgacaggaacatacaaatcgtgatcgatggcatcatcatcgggattgttaccttgaataatgtctggatcttatttgctccgtcaatctctgctgcttcaatgatatcaccaggaatagactgaagacccgcaatatagatgatcatcatataaccgatctgctgccagctgaccagaatgatcagtccccagaagccataccactcattcagagcaagtgcggtaccatatctggaaagaactccgttaaagatcagctgccagatatatccaagtacgataccaccgatcaggttcggcatgaagaagaccgtacggaagacatttgttccatgcatttcttttgtcagtgccattgcaagtgcaaatgctatgatgttaatgatcagaagagatgcaatcgcgaacagtacagtataccagaatgaatgacggaatgccgtatctttcagtgcttctatgtaatttgaaaatcctacgaatttcgcgtctgttacggttgtaaatttacaaaatgaaagccagattcccataataaaaggaacgataaagccaagaataaatgcaaaaaacgttggaagcacaaaaatcggcatataacgtttgatggatttttccataataaattcctccttccatgcagagaatctccgcttcatttccctgcactttttcataaaagcggcgggtgtttcttgcaaccgcccgccactactcacttcatataactattttgattgttacatttttatttttattttgctgctgcagcttcttttgcccatccgtcaacgaatgctgttgtaacttttgcccagtttgcatctgtcggatctgctgcgtaacttgtcagtgcagaacccactccgttcttccactcttctgatggcattgttgagaagttccaagatacaggagtctttccgtcttctgtatatttgtttgcttcgttaacaagtacgttgtctgatttcaggttcttcttaaatggaattgtgaatcccatgtctttgcacattgcctttacaccatcatcagatgttacacaccagttcatgaaatcaagtgttgcctgaatgtcgtcttcagatgctttggagtttacacaccagtagttctctgtacctgtacagattccctgatcttcttcgccttctacaccgatgtagattggaaggattccaagattgtcatctccgacgtctttgatgttgttatattcccatgtaccattctggtagaagactgcatcacctgttacgaaatctgctgttgcatcgtcagctgtctttgtagaaagttctgttggtttgcaggtagcgttgttgatgtagagatcccagatctgacggtagttatcaaggtatgttcctttgatagcatctgtgttatcgattccttcatctttgtattcatagtagattggaaggtttgccagatgagttttgaatctccagtcagatgatccgtccataccagcggatgtaaatgctgagaatccaagtttgtccttatttgctgtgatatcttctacaactttcttgaagctgtcaaagttagtgatatcatcagctgagtatcctgctttctttaacagttctttgttgtaaatgattccgtagctttctattacgtatgcgattcctgacatcttgtcgccgtccatcagtgcgaaatcatcacttgtcagctgttttgcaacatcagaatctttcagatcgtagcagtaatctttccagcttgcaagtccaaccggtccgtttacctggaacagtgtcggagcattgctcttagccatctcagattttaatgtcttttcgtattctccggatgctgctgtaagtactgttacatccactcctgtttcttttgtatactcttttgccagatcctgccactgctcatcctgttctggtttgaagtttaagtagtatacttttccttttgcgtctttcttgtctgacttgctgtcagaagagcttccacatcctgcaaccattcctgttgccatggctgctaccagcattgctgatacaactttacgcattttcataattcatttccctcgcctttcttttttgaaaccttcgtttctcttgttgtcattatattaacagaaatgcgctcaaaccctgtatcaataaaacaacctgatatacaaaaaaacatatctattgttcttcttcaaactgtcggatgctttcgtcttctgcctgcgtgaattcctgctccgttatctttccctgtaccagttccgccagacattctcccagtacattctcctgcagcagtgaattccacttcacctgataattcggtacgatctgtggatttcccgtataagcctttagataatcatccaacagcgttccttcctgtcttgtcctgctgttcagcaattcttctttctgttctttattcaatttcgttctgaatttgaggaactcaactgctccttttttcaccttttcactataagttgatacaactgcccagccgaatgtctccggtgagcctatcagtttattttcaggaaatgtagaaaaacatacttttttctgcatttcctccggaatcttatcaatcatccagtaaccattaggtatcatcgctgcatttcctgccacgaaattatcataagctacgtcaaaatcattatgtaatgcatcctgggtcgtatattggaataatttttttaatgtaccggctatctccagccccggttcattctgataggtatccggatataattgcttcatgaatgccgcaccttcttcacttcctgctacttctgctgttgcaagcagcattgcggcccatgccgtcccttccgtatgcagggcaagcggcgtgatccctgctgctttcagtttctcacaacatttccagaactcttcccatgtctcaggaaatctgctgattcctgcctgttcaaataactcccggttccagaaaacccctgaacaggcgaatgccgccgtgctgaccggacccagataaatctttccatcctcttcccggaccgattccattactgacggttcgatcatatctttccattcctgatcttcgttaatgtaaggtgtcaggtcctcaatcctgcctttcttgatcatcatctgatagaaagacggaagcatacgcagatcagtgataatagccggtaattcatctgtcacattcatacgtttcagattcttccggtattcttcctctgtctccatcacccagtccacatctatatgatacttccctttgtatgccctgttgaaccgctccaccacttcctcttcattcttattaccggtactggaatctacggtaaggatcattgggatctctactactttattcttttttctggtctgtgtatcctcttttcccacacagccggtcagtgctgccagcatgacgatcaccatcactgctgccataatccgtctactgttcactgttttctttcccgtcatccgggatctggataacacagacggttccatttgtatccgattcatagaaaaatctcacatcctccccatactttaaccgcagtcgcgtaataatatttatcacaccataaccatgttttttgtcttcaaaactgtctttcatttttgacaccggtatctctgacagtccgtttaacttctccgccatctgctcttccatcggagttccgttattatagacactgaatgtaagctgtcctgcctgttcagtgacactgatccttatcagaccgccttcgaagatatcacaaaatccatatttgactgcattttccacaattggctgtaagatcagctttaatatccaccttgttttcagttcttctgcacattcgatctcataacggaacagattctcattgcggatctgctggatctccatataactttttacattttccagctcgtcttctactgtcacaatctcacgtcctttgctcagtgacagacgcagatactttgacagtgcctgtatcatcttcatcgtcttctcttccccgttgatccgcgccagcatatagatggtatccagggtattatagagaaaatgcggattgatctggctgatcagcgtattcatctcactgattcttagttctttctgctgattcttgacctcgttctggaactcttcgatattctttaacatctcgttataggcatgcccgatcttatccagttctgtgtccgtatggatctgaatggtatgtgtaaaatcatttccatcaaaacttgtcatggcatcactgatctgtctgatcggccgggtaaatgtctgtgatgcataaagacttaatacaaacgccagcactgcgatcaccgcatagatagtgagtaatacgatcaatatctgcgtcattccctgattcaataccatatccggcaccagtgtaaagatcaccatccctgtctcttcctgccggtatgcctgtaaaatcccgccttctatcttttttccccgcacgatcacaccggattttttcgttctggtcagttccgtaatcttcttcattgtccttttttcgatactgagatcttccggttcctgccggatgcaagtctttccttccggacttatgattcccactgcaacatcttttgcaatcttcctgtctttatccataacactttccagaaactgttgattcatcttcagatacacgattccaggttcatgtgcgtaatccatactgttcacatatcttccgataaacaaagcttcgtcccccgtaccaaacaggtaatcccgggtccatatccactgcgtcttcgcatattcatcccccattttctcacgcagaccgctgctttgaaaatccgaataaccaatctgggaataggatttttcgtaaacatttcttttattatcaatgtagcagtaatcagcgacatgattcagatctatatatgcaaaatatttgctcagtgcattcttctctacttcctgcagttctttattcctcagactcttctgcacatcattttccaagatgatctctgctgtcacggcatccgtcttccggtagagattatccagggctatccccatcttttcattcatgaattcatacttatccacaatcacatctgtcatattccgtctgacataagtccatacacagatgcttgaaagaaccagtgccagtatcagaagcgtacacatatacttcagatactttttctggattcctgacattttactttttttcatacttcatattcccttttgtaatctctcggaagctgtcctgtatattctttaaacaaatgcgaaaaataggatggattactgattccgacctgctcgcagatattaccgatgctggttcttccgtcttccagcagtctctttgccagctccattctacgctgcagcagatattgtttgaatgtcatatgaaaggtattcttgaatacccgtccaaaatataccggattcagatatacatgtgtcgccactgatacaatcgaaagatcttcattatccagatgttcatctatatatgccacagccgctgcaatgtattcttttgatcccttattctctttcttttctgcattttccagtcttttttcaatagcagttcccagaatcttgtaacagacatccactgcttttgccgcctttaagtttctcatattcgaataataattttcaaattgctgattcagtgattcgtccatcccgtaactgtcttttaacatgaattctgtctttaccatgatcttgtgcatatactggcattgcagttcttctctgtgtggcagttggtaaataaaatgtacaaatgcctgctttaactgtacggcgtcgttcttccgcacgctgttgaccaccatcatctctgcctccgccggatatgggctttcctctttttcttcaacagtctccgggattgtaaatactcccgctccggatgcatttgtaacagcgaacaatctctgcgcttcttcgaaacttcttctgattccgcggatccctttatatggtttggatattgctgcaataaccgggctgttctcttctttttttacctcttccagtagttctttcagctcatgtaccgctgtgttctcctgcgtctttacaataaatgtacgatgtccttcttcactttcgaatttccagtatgtgaatctctctgcgatcttttcttcaatcattctgaccatggaaaatctcgaggcttcatattccagttcattggtaatcttataggccagatcaagatctgcatatactgtaataaaccggtctccttccttcatgacatcctgcagcgtatggaagacttcatctactttttcttccggcagccggttctggacatatttttgcacgacaacctgcaaaaatccatctccgtcctttttcagaagtctctcccagcggtcatacttttcctcatttctgatctgatcttcacagattttaccgacatctgtcatcgtcgcctgtaatttttcatcttcaatcggcttcagaagatatgcgaatgcccccagatcacatgccttcttcgcatattcaaaatccctgtatgcacttaataccacgaactgacattccgggttctctttcttgatttcttccattaccataagtccggaaatctgtttcatcctgatgtctgtcagcactacgtgtggttttttttcacgtattacctttaacgcctgctctccgctctgcgcaaaaccaaccacctcatatcccataccgttccagtcatacgtctttaccagaccctccagcaggatcggctcatcatctacgatcaccagttttaacaaccccatagtacacctcataccttttattaataccatcttaacatattacagtctcattctataattttttatactttttctttaccaaaaatcatatctgttatgcaaaaaatcatacattttatgtcaaaaattatacttttatgaaaaatcagaagttttggcatatacaaaacaaaaagaaaaacacaatatccaaaacgtttccattcccttctcagtgaatccttcgtttgaatattgtgttttctttttgtttcctgttatgtttatcttgcgcagacttctgtcgtttttctgatcttcttgatcagttcatctgtaaatgcgccttttttcattctccacatccagttaccgccgagtgtagacggcatattaattcttgccttattgccaagtcccagataatcctgcaccggaatgatacacgtatctgccacacttctcatcgccagacttatgaaatcccagtgcacttcttcatccggagtgtatggattattcagatattcctttgtcatctctttatcttcttcggaaagtgtctgataccatccctgaagggtatcgttatcgtgggttcctgtatagactacacagtttttatcataattatgtggaagataatcactgtcctctcctgccacaaatgcgaattccagtactttcattcccggataaccactgtcttttaacaattgtctcaccgtatccgtcaggaatcccagatcttccgcaatgatcggaaggtcacctaatgtttctttcatcgtacggaacagatccatgcccggtcccggcatccattcaccattctctgccgtctcatctccatacgggattgcataatattcatcaaacccacggaaatgatcgatacggatgatgtcatataatttaaagcagcaggccacccgcttcatccaccagtcatagcctgtcttcttatggtaatcccatgcatacaatggatttccccacagctgcccggttgccgaaaatgcatccggcggacatcccgctaccgcaaccggcagattctcttcatctaactggaacagcttcggattcgcccaggtatctgcactgtcaaatgctacatagatcgggatatccccgataatctcaatgccttgttcattggcatatgttttcagtccggcccactgtccggcgaacagatactgcagaaattcataaaaatcaatctctgcacttaattgttcctgatatgccgcaattgcttccggcttacgcagcctgatgtcttcctcccactgatcccaactttttccgtcaaatgaatctttcactgccatatacaatgcataatccgcaagccatgctttttcttcttccagataagtacggtacgccttactttccatcaatccgttctttttggctcttgcatatgcaagctttaatactttaaatcttgcattatatattttttcataatcgatttcttcttcgttctctccgaaatctgcctggtcacactcttcttttgtcagaagttcatcctcgatcagcgtctccagatcgataaaatacgggtttcccgcaaatgttgaaaaagactgatacggtgaatcgccgtatcccgtctgtccaagcggcaggatctgccacaatttctgtcctgcttcttttaatatatctacaaattcatacgcttcttttgaaaaacatccgattccatatgcccccggaagtgcagagaccggcattaacattccactctttctcattaactttcgttccttcctcgttatgatacttataattaagtatagcagtgttctttggatgcttcaaataaaaagtatactctgtatataagaaatcatagattattccacagatgtcaccgtataatccttgtcttctactgtcttcttcagcacatcatctgcgatctctgcatttaatgtcagctctgctgttcctgactcatgacttacaaccgcttcatctacctgtggaagtgcttccagtgctttctttacggctgcctcacagtgtccacacatcattccctcaatatgcattatttttttcattgtcttgtcctccttcttggatctctttttttcttttttggcttttaattttttatcttttgatgcatcatacatcttaaaaagattcaatctcaatgcgttcgatactacgcagaagcttgataaactcatggctgccgcaccgaacatcggatttaatttccacccgaacagcggataccacacaccagccgcaagcgggattccgataatattatagaagaatgcccagaacaggttctcatgaatattacggagtgtcgcacggctcatgcggattgctgccggcacatcacttaaccggctcttcatcagaacaacatctgccgcatcgatcgcaacatccgttccggctccgatcgcaatacccatatcggctcttgtaagtgccggtgcatcgttgataccatccccgaccatcgcaacttttcctttttctttcagcttacggatcacctgctcttttccttccggaagtacgcctgcaatcacttcatcaactccggcctgctgtccgatggcttttgcagtacgttcgttatctccggtcagcatgactacatggattcccatgttctgtaattctttgatcgcctgcgggctgtcttctttgatgacatccgccactgcaattacacctaataaacggtcttcatttccaaagaataatggtgtcttacctgcttcggcaagtttctctgccttcttctggatatctccatcaacagataccttactgctgataaatgtatgatttcctccatataatgtatggtcatccagtatggctgtcagaccgttacccggaagagcctggaatccggtaacttcttcgatgccggcattttcctcttttgcattttcaaggattgctcttgccagtggatgttcactcttattctccagtgcatacgcacattttaataaggtatcttctgtcactcccgctgccggaatgatatctgtcactttcggttctccacttgtgatcgtaccggtcttatccagcgcaacaatctgcatctttccagtctcttccagtgaaactgctgtcttgaacataataccatttctggcacccattccatttccgaccataattgctaccggtgttgcaagtccaagcgcacatggacagctgatcaccagcaccgcaattcctctggataacgcaaaaccaatactctgtcctgcgatcagccatacaataattgtgagcactgcaattgtgataaccattggcacaaatacaccggatacacggtccgcaatctttgcgatcggtgctttcgttgcagccgcatcacttaccatctgaatgatctgcgaaagtgtcgtatcctcgccgactctggtcgcacggcacttcagatatccggactgatttacggttgcggctgataccttatcaccgacagccttatctaccggaatactttcacctgtaagagcagattcattgactgcactgtttccttctatgacttctccgtcaaccggaatattctctcccggttttacaacaaagcaatctcccttttgtacctgttcgatcgatacctgaacttctttttctccacggatcacaaccgctgtctttggcgcaagcttcatcagtccttttaatgcatcggtcgtctttcctttggatcttgcctccagcatctttccgactgtgatcagtgcaaggatcatagctgctgattcaaaataaaaatcatgcatataagacattactgcatccatatccccatgcatctgcgcatctgtcattgcaaacagtgcatacgtactgtatacaaaagacgctccggatccaagtgccactagggtatccatattcggtgcccggtggatcagtcctttgaatccactgatgaaaaacttctggttgatcaccatgactgtaatcgtcagaagcatctgtaacagtcccatcattacatgattgtctttcatgaatcccgggaccggccatccccacatcatatgtcccatggagaaatacatcagaacgatcagaaatcccaccgatgcgatcagacgtctctttagtaccggcgtctctctgtcttttagcatatcctctccggccaaagcctgtgccggctgcaccttcgctgctccttctcctttttttgacgctccatatccggcatctttgactgccttaatgatctcctgttccgttgccgtgccttctactcccatagagtttgtaaggagactcactgagcaggatgttacccccggtacttttgaaactgctttttccactcttgcgctgcaggctgcgcagctcataccggttacaatatattgtatcatcgttgtctgtttcctcctgtcatcttatttcttattgtttaccgcatcagtttctgcagaacctttaccaactcatcaaccgtctcatcttttccttctctgatatcatccgctacacaggtgcggatatgattcgccagtaatactttattgaagctgttcaatgccgcattcactgccgacacctgtaccaggatctccggacaataggcatccttctccagcatacccttgattccgcgcacctgtccttctatccggcttaagcggttcatcagatctttgtattctttttccgaacgatgcttggacgtgtggcaacagcatcctttttctgatttgttttccatattatctgtattcttgtcttccataagcatactcctttcacatccatacccttacggggtatatgtattttatctcttattatcacataagtcaaggaatatatgcgttcttgatatatgttttcatttattggtagttccaatacaatttttaaaaaatgtctattttatttgactttcaaaatttataaggaatataattcttgctgaaggaaataatgacagcagaactggaggttatattatgctggaagaacaggctatgataacattcttaaaaaaattcgatgaacaccctttcctggtcaaaattaatggacacgaacatctgatcggggaaggcgcacctacatttaccgtaaatttcaaaaaggtcatcccattaaaggatctggtcaccagtacttctcttgcacttggagaagcttacatggatggtgatcttgatattgagggaaacctttatcaggcacttgataaccttcttggtcagatgggtaaattttcaactgatgaacatcatttgaaatctatcatgttcccatcttcatcaaagaaaaaccagaaaaaagaagtcagcagtcattacgatatcggaaatgacttctacaaactctggctcgatgaaacaatgagttattcctgcggatatttcaaacatgaagatgataccctgtatcaggcgcagaagaataaagttgattacattcttgaaaagttatatctgaaagaaggtatgactcttcttgatatcggatgcggctggggattccttctgattgaagctgctaagaaatataaaattaaaggtaccggcatcaccttaagtgaagaacaatacaaagaatgccagaaacgtatcaaagaggaaggattgtccgactatctggaagtcaggctaatggactaccgtgatcttccttctgacggcaagatgtatgaccgcgttgtcagcgtcggtatgctcgaacatgtcggccgtgagaattatcagttatacttagactgtgtcagcaaggtcatgaaagacggcggtctgttcctgctccacttcatcagtgcattaaaagagcatcctggtgatccatggatcaagaaatacatcttcccgggcggatctgttcccagtcttcgtgaagtcatgaactgcatggcagaagataacttccatacccaggatatcgaggacttacgtcttcactataaccgtacgcttctctgctgggagaaaaacttcaaagatcatattgaagaagcacatacaatgtttgatgaacgtttcttaaggatgtgggatatgtacctctctgcatgtgccgccaccttccataacggaattattgatatccatcagattttaatgacaaagggaattaataatgatcttcctatgacgagatggtattaaaaaatgaatcagccggggatatgaacaatatttcccggctttaataaagatggataccatgctgcacttaacatctaatacacatgcataaaaaggagcggagccggaatcctgtcactcctgacaaaatcccgactccgctccttttcgatatgtattcatttcaatcagaacgtcgtctaatttaccatactatcccttattcattctccgttcgatacctactctttggatttacttctttcttttttaaatacacgtatcatgaaataactaaatccgccaatatatccaaccagtgtaatcaccatcataataattgcatctatcgtcatagttcataccttctttctattattttgcagctttgttatctttcatagctccccttgcagtctttgtattaaagaacttggatagtgcaagacctacaaggatcactactccgaactgaagtaatacagttcctgtgttatcctgaataataaacggattcagccaggtatccgggaaccattcctttgtctgtaataaccagtaaaccaccatgatcactaccaaaaccggaatcagatacatacatccggtataatatgcttttggaagatgtacatctgcaccttttgcatttacttcctgtgtacgtaatttttccacaccatatttccatgccaggattgcgataaaggcaccacttatcagaagtccgattccccatacccagtcctgattatcaatgttaaccagtgaccagcatgagaagcatcctactaagaatcctgcgaagcagacactgacaactgctttcttccgcggcaatccaaggtcaacaacacattttactccaacttcgatcatagagaacagtgatgtgattgctgcaattgcaagtaatccaaagaagataaaggaaatgaatcttccacccgggattgttgtaaataactgataaatgtaaataaatgtaagtccgaagttgccctgactgagtgcttcattcgctgcctccggtgtagctgaaagtgcacagattgccgggataactaccagtgccgagaggattgctccaaggttatcaccaagtcccatgatcagacagcttgtcggaacatcttcctcttctcctacgtagttcgcatatgtaataatgaatccccatccggctccggtgctccatgctgcctggatgaatgcctgaatccatgtattcgggcttaaaatatactctttcttaacagtaaagagatactgaagtccctgatttgctccatttaatgtaactgcgtaaattgctaatcctacaaggatgataaacagtgccggtatcgctactttacagaatttttcaattccacctgcaattccctgataaacgatgaaacatgcaagtgcaaatccgatcgcatggaataaaataacctgtgcctgtgaatctgtaaatgctgtccacattgccgatgtcgtctctgttgacagattcggtttaaatgctgaagtaacagaattaactgcatatttcaaacaatatccctgaagtacacaataataactcatcaggaagaaacatactgctgctacaaagaatcccatccatgtatatttctttccacctgcatcacgaaaagtaccgatacatccaagtctcgtctttttaccgaatgccatctctgtggaaaggagcggtactgcaaataccagcattgcaatcgtccatgctatgataaatgctccaccaccgtttgccgcacacactcgtgggaatcgccatacattaccagtaccaatacacatacctaacgcggcggctatgtaacctatggtactaaatttttcttgtttctgttccataactcaaacctccattcgaatatcgaaattaattagaaatgaataccttgtaaccatagtgtaaaagatggttattaaattgtcaatataaaatattaagtttttttatacaaatataagaaagtgtaatattaaacgcattttgttttattatttgttaatttctgataatttgccagtaaatagactggttttcatactttagtctaatacatctacaatttcggatgcatatttcggtatctacagaacctgccaccggcagctcctttcgaacacatggtgatacacaaaaacctgtatcagactttctatcatctgatacaggtttcccgctttctcataacaattcattatactatatattttcttttttaattttaattctttgtattctttcacataagcttcttatgctacagatcttcttcaatatgctctcttccctggtctacgatcgtacgcacatgatcgtctgccagtgaatagaacacggattttccttctcttctgctcttaaccagtttgttctgtttcaggatcctgagctgatgtgagattgcagactgtgtcatattcagtgcctctgccagatcgcagacacacacctctgcttcgaacaacacgaacaggatacgcattctggtcgaatcaccgaataccttgaacaattctgcaagatcatacaattccgtttcttccggcatcttttcatttacgatcttcagaagattctcatgtacctcacatgattcacatacttccattccttcttctaattttgccatctgcccaccagccttttctataagtttttcacaaataatgcgcggattgcattcaatacagcaatgaccataactccgacatcagcgaagattgccatccacatattcgcaattccgagtgctcccaggaccaggcagattgccttgattccaagggcaaagtaaatattctcatatacgatgcgcatacattttctggaaatcttgattgcttttacgatcttcttcggatcatcgtccatcaggacaacgtctgctgcctcgattgctgcatctgatccgagtgcacccatggcaattccgatatctgctctcgacagtaccggcgcatcattgattccgtctccgacgaacgcaagcttttctttctctgatttctgactcagaagctgttctaccttcgcaaccttatctgcaggaagaagctcactgtacacttctccgattcccagttcttctgcaaccttatctgccacacgcttcatgtcaccagtcagcataactgtcttggtgatgcccgcttttttcagatctctgattgcttcttttgcatgcggttttaatttgtctgagatcagaatgtgtcctgcatattttccgtttactgcaacatggacgatcgtaccgacttcttcacattcactatattccacattcagatatttcataagtttggcattacctgccgctaccggaataccgtcaacctttgcagtcacacctttaccgctcagttcttcaatctctgtcacacggtcacggttgatctgtttgccatatgctttctgaagactcttactgatcggatgagaagaagaacactccgcaagtgccgcatactctaataactgttcttccggcatcgtattgtggtgaactccattcacctcgaatacgccttgcgtcatggttcctgtcttatcgaataccacatattttgtctgtgccatcgtctccagatagttcgatccttttaccaggacaccttcatgacttgctccgccgattcctgcaaagaagctgagcgggatactgatcaccagtgcacacgggcagctgataaccaggaatgtcagtgctctgtagatccagtcgccccattccggcgcaagcgcaaacgcaaacattctgaccagtggcggtaagattgcaagtgcaagcgcaccatagcagactgccggtgtataatatctggcgaatttggaaataaagttctcagatcttgatttcttggaacttgaattctctaccagatccaggatcttggatacggtagattctccgaattcttttgttgtacggatcttcagaagaccagtcaggttaatgcatccactgatgacttcatcaccggctgccgcttctctcggaacactttccccggtcagtgcactggtattcaatgtactgcttccttcttcgatcacaccatcgatcgggactttttctcccggctgaacgacgataatcgttccgacttccacttcatccggatctacctgttcaagttccccgtctttttcaatattggcataatccggacggatatccatcagatcactgatattcctgcggctctttccgaccgcataactctggaataattctccgatctgatagaacagcataaccgatacgccttccttatagttaccaagcgcaattgctcctatcgtagcaactgccatcagaaagttctcatcgaatacctgcttattcagaatccctttgaacgccttccttaaaatatcatatccgacaaccaggtacggaaccatataaagtacgaacttcagccacccttctacaggcaggaacttcaatatgatcataagtaccgctgcgataataattctggtcagagattttttctgtcttttcgtcatatctttccccagcctttctccttgcactcttctcaacgcttcttcattctgcctgatgaagccgctccacaatcattttccttcacaaaatactgcgtatatcctgtttttatgagtattttctcttacaggaagatctcacagtcatcttctacaactttacagttcttctgcacatccttcattactttcttaggatctgcaccctcttcaaattctacgatcatctttaacatcataaagtttacagttgcatcctttactccgtctgtgttcttagctgcctgctccattttgtttgcacagtttgcgcagtctacgtcgattttgtaagtttttttcatgataatacttcctttctttttcgttgtttgattatttgaatatatgaacagttattcatatgtttgttttaattatagcattttgcttcatgatgtcaatagattttttctatttaatgcattaagcggttgatatccggccggaagaaaaggaagagagtcccgctgcgtgctgattcaatcatacaccaagaatctgtttgctctgaagtgattcctttgcactgccgacaactaaaatacccagaacagacaaaatcccgacaagtgttacgattccaaatttgtaattttttaaattgtatggtttagtaaatctatgtgatctcacgtttcttctcctgctatttttatcactatctgtgaacggttaatctctacctgaaaatcatcttctgtaagttccatatatttggaaagtgtttcgtataaatctttgcaaatatgttcataagccgaaggagtacattgtacacgatctgatatgaccaacgtgcgcagacgattctttgcaatggatacggaagagtttttcagcataataaatcctcctaattcttcctgaaagcatgggaaattctggaaaataaccctttgcctgtgtcaagattcataaaagagacttccgtgcccgtgattcgtttgcaaatgttaagatatccctttccggcttttgaatccaatccgattaccggttccccctggttcgttcctattacaacctgttcgtcatcaggaaggatcccaatcagcggaacggcaagaatctctgtgacatcgtcaaccgacatcatatctcctcttttcaccatatccatccggatacgattaatgataagatcgattgtatggatctggttctgttccagaagtccgatgatacggtcggcatcacggatggatgatacttccggagttgtaactacaagtgcacggtcagcaccggcaattgcattttggaagccctgctcaattcctgcaggacaatccagaagtatgtaatcgaattcttcttttaattctgcggtgagtttcttcatctgtcccggagaaactgcggatttatcttttgtctgtgcggatggcagtaaataaagattctcatatcggctgtctctgatcagtgcctgtttaagccggcagcttccctcaacaacatcaacaagattatatacaaccagattttccatgcccataacaacatcaaggttgcgaagaccgagatcagtatcaataatcactacctttttgccaagcttagataatcctgcacctatatttgccgttgttgttgtctttccaacaccgccttttcctgatgtaattacaataacttcgcccatgaataacttcctcctataactggttttactttaatccctccgatccgcagttttttaggctgcatatggagtgctgctatgacagcatctgtcctgccggcggcacctgcaatcacggttccgtatatagtacctgtcacgattacatttccttttgatgcaaccgttgcaccctcttcaacatctccgatgatcacgatgctctgttccgactccagaacctgtcttcctcttaatgtacctttatagaactgtccgtccctttcatggatagcttcaaggctttcgtccagtaattttttatggacttgttctgtagcagtattcttttcaataatgcatagtatttcaataccggcagctgattcaatcgctcttgtcagctgccgctcttcttcttctgtgaaagaacggccttcatattctaccgccatttttgcatgattaaaaaatttggcggcagattgaaatttgttttttacgtcatcaagcaattcttcaaatgaattgtcggaattaaaataaatcgtaatgccgtatttgttgctcttgatgagaacatcatctttcacatagaatcatcctttctttaatctccaccgtttgatccaattccgatattggaagcctctccggtgatcagttcattttccggagtaactttataataatactccatgacattattaccaacttcagctgcaaaagttgaactgtaaccattggcgatacgtattgcaaatgcaatctgtggactgtcactaggagcaaatcctacaaaaagaccatgatccgggtgagtctgactttgctgagctgttcctgttttaccggataattgtacaccgctggcatttaattttgtgaaaatatctttgtgttcggatgttaccactgctctcataccttcgtgaactgcctgccatgtagtagatgatacatcggttactttattttttacttccggtgtataatcttttactgtctttcccttcggattagtcactttgtctaaaagacttaaattatatacagtacccttatttgcaacagctgtaatatatcttgccagctgactggttgtatagttgttggttccctgtccgatagcggataatacagagttgtcatcggaaatctgcggatctgattccggaatttccataccggaagtatctccaagtccgaattcttctgcatatttctgcagttttgcaattcctctttcacttgaatagtaattctgagtactctttccgtcagaagtatcattatctaattttgaatcgcctgtactgttaaggccaagtctgtatccgacttcatagaagaaatcattacaagaatgttgaattccctgcgatacattcaggttgccatgagcagacggataaatccagcactttggatttggtgtaacttttttatatacacctgcgcacggaaggtaagtatttacatcaataacaccttctgtcagaccggtgatagcagataacggcttataggtagaacctggtgctgttttttcctgagttgcattattataaaatggacgagactgatttgtaagcagtttactataataatcggagtccatagtatttgcaagacggttgttgtcatatcccggatatgatacacaggccagtacttcaccagtattcggatctgttgcaactaaagatccggtacatggttcaagtccaagctgtcccggggtaatttccagtgattggatcttgctgcggataaaatcataagcaccgatgcttccggcttttaagctgtcgtactgattatcttttttatccagaatattctgctcatataacatcatacatatctgtctgccggtaatagttcctgattttatcatataacggtagatcagtttgtcaaaattgttatcggtatttatataatccagaatataatttatgattccctgatatacttctccggaatcggaatattgttcgttggattttatatagtcttttaataaagaagtatctatccagttctttgaaattgcataattcaaatacgtataaacattaatagattcttcatctttccaggctttatacgtagcatctttagtatcaatggattttgacatcaagacgcctgtaccgttagtcagtacatcagataccaggtatgtcagatacgcctggacttcttttggctgatttttgtatgcggcagcttttgaatcattcagcacttttgtcagtgtatttttaacttcttcttttcttatagaaaatgcagaggcaacttctttttcagcttctccggcatcgggatccgtaaagtgtgtcatgtcaagcacatcattattgatcattgcgttatatacatcaccgatcgggatgataacgtcacttccatcttctaccttattgcggtcaaaatcaagagagttctgaattttggcgagaagaactcctgcaagttcctcgtaataaccctgcagacgcaaacattccctcggaactaaccttcttattctgccgtgatacaagatgccatgacgatcggttgcagtaattgtaaacatcggttcttctggttctttcatacgtctgccgttctgacggacattttctttggctggtgtaaggactgctcttgccccttcttcccttaatacaccagaacattctcctttgtatttgtggattccgcattgtcgggtattaaggcttctgcattcttcagttaccagtggtggtggagacaaatccacgaaatgaagtgttccctgttgaatacctgtagtcagggtatgtgcaatctgatgtccgactcttcccctcctgctgttgagattcgcatagcctaaatcgatgctgtcaccctctcttgcaagtttatagccgagctttgtattttctttaattggaacacccacatcatataatcctgtcttgccgcccattccacctgcctgtgatgtcagggtacagcttagtcctttgggactgtagactcttttcccctgacttcctgcccggacttgaacaagagctgctccatttgtttctggttcaggtaatacttttccggcacatcggaaatcaaaatatccgacaatatacacccgttttcttgcttgggggactccgaaatccttgctgttaagcactttccattcgacatggtaccccagttcagaaagcgtactgaggatggtgcaaaacgtccggcctttgtcatgcgataacaaaccgggaacattttcaaggataaaatacgagggtcttttagcttcaagaatccgggcaatttcaaaaaagagagttcctcttgcatctgcaaatccttctcgctttccggcgatagagaatgcctggcaaggaaatcctgcacagagtaaatcaaaatctggcattcgttctggttcgattgttcttgcgtcattacaataccactccccttccgtatcaaacagcaatcggtagttcttatccgcataagtatccacctcgcaatgtccgacacagacaaagtttcctgcccgtcttaagccttcacggaatcccccgattccgctaaagagatcaaaaaattgaatggttgcggctatcaacctcctttttgctgataaaaacaggcggcatgatttctcataccgcccttcgttattctgtatcaattggttaccattctgttggttcttctgctttggtttcttgttccagatcaatttctccttctggttcagtttcctcttccgtttcgctttccccttctggttcgttttcctctttcggttcgctctccccttctggttcgttttcctctttcggttcgctctctccatctggttcgctttctccttcgggctcgctttcctcttctggttcgctttccctttccggctcagtgctttcttccggttgagtttcttctgttcccaattcttcggttgtctgttcggattcttcaggctgatctttgctttgccattcggcctctgccttttccagtgcttcttctataatctgaattaagaaggctttctgtttcatgtgtttcttcccgatgaccacttttaatctctggaataattcctctgatacctgtactgctactgttcttacttcttccatgcttatttctccttttccttccagtctgtcgaaatgttcttcaatgacctgttgtaaaaatttttgtgtgctgctttctgtgagttcaatctcttctcttactttctcatgtaagtccatcggaatctttccgcagatatttttcatctctgccataacctttctcctttctctttcgctacacacaacatactccaaagccgcatggaaagctattcacaatacccaccaaagataacgatgcatttcttgccttgcccatagcagatccaacaatgtatgtatcgtgcaatcataggcctcaccccctttacaaattttccatttgagatagaaaatccatcatctgatctggtatttcttccgatgatgggttcgttgtcgattgttccatagtgccacatattcctaattcccgaacactttcttttatcgtcttttgaatgacttcttccagccattttcgatcctctttttccagaattgcctgaaccagatactggcttttctgcccttctggaacactttgaaatttctcccatgctctctggtgttctggatttttcaggttcgggcggaacgaatacacagggcgtgtcatctcgcccacatctgctctacaatccgttcataccctgttgcgttggcatagacgtcctctataaaaacagagcggcaaatcgcgtcctgtgcggtcacgtggcgttttaaaattgcggagcctccacccataaatacggttggtactgcccgtgccgtcataatatgcttctgttccaaacatttcagcaacaacttctgcagcacgttgtctggtaatccctgtcatttcgatttctgtgccaaagtattggtcttttataccgatcatgcctaatggattcctttctcagacacttcttgtgcgttgagttcggagtctgccttttgtaataatctgccaattgcctcgataacattgacagttaccccgtttccagcctgtttataaagctgtgcccagccgatggatatcgactaagcatagatccaatcacatatcaagggtaaataaacacccgattttatcgggtgcccttaacatacaatagaatccatgctactaaatagacaacgggctgaacagcaagagatgccattcagcccatcacattatattttagtattctataaacctacgattttatcatcaatctgagaggtttacacagaataatttacactacctaaaaaagacatactttaacacacctaaatagatgtttctgaaaaatttttgaattttcaaaaattatgctgtttttaaaggaaataaatgttttcctgttttccctttttgaattttattatgaagtttattcacattttttgccattgcaagcaaaatactttctgcgagaacattagatgtaccccggctcaagtatcttcggaattgcatatcctgttttaattctccaaaagaaccttctacctgaatacttcggttggttctgagatggatcccctcgtcggatagaattcgttccaaatcttctttgcgatattttaaaaatgtttttgctaccgagagcaccttatgacgctcttccattggtgttttacagttattccctttgatacagtctcttttgtatgggcagtctttgcattcactgcattgatagattgttttctcactaatatatcctgtttttgattttgaacgacgcacataagtagataacagttgttttccgtttttacaagtatagcagtcttttacttcatcataattcatattttctattcgtccgatatcttttttatattttctagttttcgatttttcataatttgatggtttgataaatgccacctggccgttcttttctaaataaacataattctcttcacttttgtatcctgcatcagcaatgatctttttatatttaaatgatagataggtttcagcctctttgaagaatggaatgagcgttgtggtatctgtaggctgagggctaatcgttagccatgtgatgtattctgaatctactccgtgatgtaaattaaatgcaggttttaattgcccgtttcccatagcatcttctttcatacgcataaaagttgcatcaggatctgttttggagtagctgtttcttttgccacaaatatgcagctttttggtatatcctttcagacggtcaagataactttctaatgtttcaatactcttttgtaagggagattttctctttcctatgccatgcacaaaatcaatattttcttcctgctttaatgcatacagttttctgcgcaatcgttttacatgcttcattttaactgtatccccatgaacaatctgaattccatagagttgctcacattcgtcaataaaatcagcaattttcatcaataacttttcctgatttttagatacagattttttccacacaaaagtatattcgtttgcacaggcttcaatctttgttccatcaataaagattgtttcaccagaaatttctcccagttcataaaggaggcccgacatttcagcaagaattcgtttggcacacggagcgaaatggatactgcggaatcgggcaaaggtagcatgatcaggtactggttttccttctaaaagatacataaaattaatattacgtttacagttaagttcatggaacgggatgaataatcaccattcatgtaagaatacaaaacaatcttcaagagagttcttggcgaaactgtatttattctttcataagtagaatataagtcagtcaaatccatagcctccacaaactgactcagtaaccgcacagaatcatctactggaataattgtttccaaatttaaaggaagttttagttgatatccttcttcgttcaaagtataatttttatgtaataatataggagtttgcatgcttatattttacacctacagccggactttgcgaagtctggctgtaattttttgcacagaaaaggagctgtgcactaatgtttagtgcgacagccccttgtctatcgacatgtgttccaaagtattcaatgccgtagccactaaattctgcaaaaataatagcaagaaagggttagggctaatgtgtctgcagatctttcatggcaagatgaaaagctccctgtgcggcaattggaatctcttcagagtcatctaacacaatattatggaaagcagggtcttcttttaacagatcataaagcgcatgactgaaagcaccgttcccatggatgacaatacgtacattcgtgacatctttaaaaaatgctgcattatgaagagcggtaagatcactttccaatacaattccgagaacatagttctgcagattatattttgactggctgccaaaccggtcaaaaagtcttgtgagaaataatgcacgtccaaagccttcctttcgatgcatttcacagccgtattgtatcatttccagattgtagtgttccatggatggaaatccatgatcgacagaactggctacaatcgtatcattgacgatggaatttaataattctccggagagtgtggtgcttgtagcgagaactgtgcagttttcgtctatgaagacgtacttattatgagaaccaggcagaatataaatggtattctggtcagagccatactgttcgatcaaagcataagtctccgtctcttctccacgcataatgtcaaatgtgcgtaaagaatcaagagattccgggttggaaagtgtattctttatgccgggaataaggacaatctcttttgaaaatacttccggcaggtggacacgcaccaggtgctcctgataatttttcatggaaacaggagcagtaagatgtggcacttcaaggatgccaaggtcgctggtcagcattccggacatatagactccttggacagcattatcggaaactgcacattcggtaagcatgctttcaatcatattgtgaattgcttttttccaggcttgattgctgccatttatcgcagacgttttggctccgattgcttgtgagcgttgtgtaaggatttggccattggcagtccaaagataagttctggtattacttgttccaccgtctacagttattatataattcatgatttatcctccttgataatgagtatgagtaaactgttgttataatgtttgatgtgaaatggcagtacagtatctatgtgcgatttccgttaattcactgtatttttcttcattagctaatttggaaaattctccggcaatgccgtaaaaatctgcaccggatttttgccatagagttatattttcgagattcactcctccggttggtcctataagcgcctgtgggatcggagcttttatggcttttatagaatccagaccaaggatagaagccgggaatagtttgatcatatttacgccaagttctaaagcagtcatgatttctgtcggagtcatacagccgcagatgaccggtttctggtaacggttagcacattttataacaccttcattgagcgtaggagtaacaatatactgtgcgccgtgctgaatggcattcagacaggatgcttcatcaagtacagtgccggctccgatcaacagatcagatacattttgatagtgggaaataacctgaagtgctccgggagtattcagggtcacttcaattgcctggataccgcctttttttaatgcttcaattcctttttgcgctttttgaggagaatctaagcgtaagatggcgataatcttattctctaacagttgatttaagatagatacataattcatttataacacctcgtttgtttgtaaataataactagttcctatataaaaactataacactagaaaggaatggtgacaattctcaattgataacaaaaaaacttgcctgaatttggtaatattgtatagagcattcatttgggatatgataaaatgagtgtaaatgaaagagaggaagctattatgcaagaagagaaaatgcaccgatcgacctatcgggttttgaaaatatttgagcttttatctgcaacttcggaaggaatgtcactgaccggtctggcacagaaactggagattccaaagggaagtcttcatccaatcttaaagaccatgcaggcaatgaattttatcagaatgaatgataatgggaattatacaatcgggcaggcagcatattttgtgggttcttcatatacgaagaattccgatctgttacaggaaatagattatgttttgaagaatttgtcatctgcggttaatcagacagcatatttttcggtattatccggtggtgaggttttatatcttttggaagaaagagtagcgacccccatcacgatccaggcaaaaagaggatacaaatatccggcatatgcaacaggtattggaaaagccctgcttagcggaaagacagaaaaggacattaaaacattatatccggaagggttatataaattgacagaacatacaattgatgattttgacacacttttctcacagatggaagagacgcaaaaatcagggtattcatttgaaaaagaggaatcgaataaagatgtgcagtgtattgcagttcctgtaaaatacaaagaaaatgtaattgcaggtatgagcgtggctgttccggtgttttactattcagaagaatttgaaaaaaaagcaatggaagaactaaaaaaggcaaagcaacatatcgagaaactgatccaggataatacacaggagtgggtatattcaccattgggaacagaaacataaatggcatgaccgggaggtgctgtgatgaaacaaaaaaatggaatgcctctggcgcaggcggcggcagaagatatcattgagatgatccgaaccaatcatatgaagccgggagaccgtctggagaatgaatatgaactggcaaaaaaactaaatgtcggaagaagtacggtcagagaagcggtaaaaagcctcgaaacaagaaatatactgacgataaaaagaggagccggaacctttatttcgcaaaatgaaggtgtagcggtagatccgcttggaatttccctgatgggaaaggatgaagggatagcattagaacttctggatgtacgtatgatactggagcccgaaagtgcagcactggcagcaattcatgcagataagaacgagattgcggagatatccagacagaaccggaaggtgattggaatgatcagacaaggattggatcatcatgaagaggatgcacgatttcatcagctgattgcagaggcgacaaagaaccggatcatagcgaagcttgtgccgattattcagcagtcagtaggactgacagccgagatgacgagtaaacgcctgacagagacaacggtgagttttcatgaacagattgtcgaagctataacaagaggagatgcgaacggagcaagaagcgcgatgatagcacatatcagcgaaaacaggatttatatcataaaagaaattgaacgaaagcgacgttttgagtagaaaaatatgtaaaaaagtagcgaaaaataaggatgtcagacaagtttttaaaataaaaatcaagaggaaatgccttaaaatcaaggtttttgggcaattggctcttgatttttttttgacaaaaatcaagacatcagatgtatttgaggcgttaaattgtatataattaacaagtatgcacaaaataaatggcgtaaacggagaaaaaaatatacaatattgccaaaaccgtaagacgcatatataataaaaccataaagattaatcagacaattacaggggaaatggaggagagcaaatgaaagcattagtatatgctggacctaaacaggtagaagttcaagaggtaaaagaacctgaaaagcaggacgggaaagtgaaattaaatatcagatattgcggagtctgcggatcagatattggtatttatctgggaacacatccaagagcaaaagcaccattgattctgggacatgaatttttgggaattgttgcagaagatggaaagaaattcaaaaaaggtgacagagttgtcccttatccgttactttcctgtggacattgtcttgcatgcagaagtggaaatgaacatgtatgtaatacactggggctgatcgggattgatacagacggtgggatgtgtcagaccgtatacacagatgaggatgtgctgtttaaggttccggatggagtcagtgataaagcggcagcagtgatcgagcctcttgcagtacttgtccatgcaattcacatgtcaggatttgaggcactggatacagcagtggtagttggagccggaccaattggaatgttatgtggaatcatgttaaaacatgcaggggcatcaaagatatttatttccgatgttgttgaaaaaaggcttgagattgcagaagaacttggatttataccggtgaatccggaaaaagagaatctggaaaaagttgtaaaggatgcaacaaacggcgagggatgcgatgcattctttgaatgcagcggcgcagcagtgccggcaatgcagatgacagatattacaagagtccgaggaaaaatctgtatcgtatcagtacataaaaaaccacacgaagtgaacttaagagaagtgaatttcaaagaacagacagtggttggaacaagagtatatacgaaagaagaattcggaagagctgcagaacttacaaaagaattagaaacagaacttgaaaaaattgtaacacatgttgttccactgaaagaaagtgacaaagtattcgatatgatcgcagatccggaatgtggaacaatcaagattgtagttgactgtgaaaatgtataaggagggaatggcagatgtccagtaagacaaagtcagtaacagcggtattaatcgtacttgcactggttgccggagttggaatgacaaaggtaggcagtaaatataaaacacaggataaggtgaatcttatctttgcaaatgcaacatcaaattcggcgaaaaaagcgggagaaaaatttaaagaacttgtagaagaatattcagatggagatatcacagtagatctgttcccggacaatcagcttggtgatgacaagacagtagctgaaggtgtacagaatggagatattgatattggaatatcttccagcggtaatttatcaacactatacaaagattattacatttacgatacaccatatttgttcttgaattcacaggaagtatatgatgtgggatttgacggaaaagctgcacaggaaatgttaaagggtgtaagcaaagttggattgaagcatatggcaatgtgggaaaacggattccgtaattgcacgaataatgatcatgcgattgagacaccggcggattgtaaagggcagaaaatccgtacaatggaaaatccaattcatttgaaagcatggaaatccatcggagctaacccaacaccaatggcattctcagagttatttacagctatgcaacagggaacggtagacggagaagaaaatccaatcggaattatttacagtaaccgcttttatgaggttcagaaatatatttcactgacacagcatgtatatacaccgtatgtagtatttatgaatccggataaatatgattcattgacagatgaacagcaggaaattattgataaagcaatgaaagaagcatcagcatatcagctggaagtatctgcaaaagatgaagaagaaggactcaaggaaatggaaaaatatggatgcgaagtgaatacattgacggacgatcagaaaaaagaattccagaagcttattgaagatgcagatgtattcagtctggcaaagagttccatggaacatccggaatattttgatgagattcagaaagaactgacccagtatcgtgaggagggaaaataatgaaaaaaattttaaaattcttgaatgattatctggaagagacaatctgtatcatcctgatgtcggttatgacaattatcatattcattcaggttattatgagatatgtaatgcataattcgctttcttggtcggaagaacttgcaagatattgtttcatttggctgatctacataggtgtggcttatggatgcaaactgatgaaacatataaaaattgatgcggcattaaagttgttcccggaaaaagtaagaccgtatattacaattgttggcgaacttctggtacttgcatttgcagcatacatcgttgtgacaggtgtagaacttacatataaacaatggctgttcggaaaagcgtcaccagccttgggagttccattgcagtatatcaacgcagcaccggttgtcggatttggtttggttgtaatcagacagattcagacaatctggtatttggcaggaaaactgccggaaaaaaacgggggtgaaaaatagtggttgcagcagttttatttatcgcattagttgttactttagttttaaatacgccggttggaattgcaattggagtatcttctctttgtgcaattttggcagacggacgtatcagttccttatacattgtacagcagttggttacaagtgctgactcttttccactgatggcaatcccgttatttattctcgcaggagaactgatgggtgcaggtggggtatccaagcgtctgttgaatgtatgcaacgtatttttaggaagattcacaggtggacttgcgacagtaactatcgtgttatgtatgttcttcgcagcagtttccggatctggtccggcaaccgttgcagcaattggttctatggtaattccgactatgctggataagggttacagtaagagctttactctggcattgattgctacggcaggtagtatcggagttatcattccgccaagtatcccgatggtaatttatggagtatctacaagtacttccatcagttctttgtttatggcaggtttccttccgggtattttaatcggtttttctctaattgttgtttcttatctgtattgtaagaaacagggatggaaaggtgatgaaagaaaatatacggcaaaagaaaaacttgcagcaatctgggatgcaaaatgggcattattaaatccaattatcattcttggtggaatttatgcaggaattttcacaccgacagaggcagcagctgttgcagcagtatatgcatttatctgcggagcctttatttacagagagtttaatatcaaagaaatgtttgcaacaattggaaatgcatgtaatacaacaggaacaaccatggtaatcattggatgtgctacagcatttacaaagatccttacgattgaaaagattccgggagccataacaaatggaatcattaactttacagacaataaaatcttaatcttattattgatcaacgtattactacttatcgttggatgctttatggataccacaccggcgatgatggtacttgcaccgatcttgttaccgattgcagcacagttcggcgtagatccgatccactttggcatcgtaatggttgtcaacctggcaatcggattcattacaccacctcttggaatcaacctattcgttgcatcgagggttggacggagtgatctggaaacggtatgctccggaattataaaatttattctggtaatggttgtggatttattactgattacatttatcccggcaatcagtatgacgcttccgaatatattcatgaagtaatgaggaaggacagcagctatgagtatatttgatctgacaggaaaaaaagcaattgtaaccggcggatccagagggcttggccacggaatggcagaaggattgatggaagccggatgtgaagttgtaattataggaaccagagaaagtattaaagaccgtgcagctgaatttaatcaaaaaggactcaagtgtacgggagtacaggcagatttgggagatgaaatagcattaaaagaagcttttcgggaatctctggcagcacttggcgggcatctggacattttggtaacggcccatggtgtgcagagtagacatccatcagaggaatttccgatggaagactggaaaagagtgctggatgtgaatctgactgcagtatttgaactgtgtcagttggctgcaaaacagtttatggcacaggagagcaaaggaaagattattacagtagcatcgatgctgtcattctttggaggatatacagtacctgcatatgcggcatccaaaggcggtgtggctcagattaccaaagcattttgcaatgaatgggcagaaaaaggaattaatgtaaattccattgcacctggatatatggcgacagagatgaatacggcacttttggatccgaaaaatccgagaaaagaagcaatcacaaaccgcatccctgcaaagcgttggggaacagcggaagatatgaagggtccttgtgtatttctggcatcagatgcatcagactatctgaacggagcagtcattccggtggatggaggatatctcgttcgataaaaacagaaagtctagagaaagtaaagatattgaataaaaaataacagaaaaaatgtaacataattggaggaaaagacatgaaagtaattattacagactgtgatcatgacagtattgatattgagaagaaagtatttgcagatgcaggaatggaagtagaactgaaacaggcaatcacagaggatgaggtgattgagcagtgccaggacgcggagatatttattgtacagtatgcaaagattacaaagaaagtaatggataactgtccgaaattaaaatatgttgtccgttatggtgttggagtagatacgattgatgtaccggaggctaccaaacatggtattcaggtaggaaatgtaccggactatggaatgaacgaagtggcagatcacgcaattgcactggccatggtaatggtaagagaagttgtaaaaatgaatcagtttacaaagaatgaaaaatgggattatacaaaagcaattccaatccacagattcagcgaactgacggttggagttgtaggacttggaagaattgggcgtaattttgcaaagaaaatgcatgcacttggttttaaagtaatcggaacagatccatattttaaagcgacaccagagacggatgaatatgtgacagcagtttctgtagaggatattattacaaaatcagatattatttccttacattgtccggcagatggaaataaagatttattcaatgcagagacatttaagaagatgaagaattcagcagtgctaatcaatgtggcacgtggaggaatcattaatgaagcagatttggatgaggcgttgagcaatggagaaattgcaggagcaggacttgactgtatgcttggagagccggtaagtaaagattcaccattgtttaagcatgaaaatctggttgtaacacctcatatggcttggtattcggaagaagcagcaagtgaactgaagagaaaggttgcagaagaatctgtaagattttccaatggtgaagcaattcactacccgatcaataaactggcataggaggtagaagacatgatagaagaattattgaaacagattgaatgtatggggattcttccggttatcaaactgaatgatgcaaaggatgcggttccgcttgcaaaagcattgtgcgaaggcggacttccatgtgcagaagttacattccgtacagatgcagcaaaagaatccattgcggtaatgacgaaagcttatccggagatgctggtaggagccggaactgtattgaatacagagcaggtagatgaggcagtagaagcaggtgcaaaatttattgtaagcccgggactgaatccggacacagtcgagtattgtgtgaagaaagggattccgattcttccgggatgctccagcccaagtgatattgagcaggcaatcaaatatggactggatgtggtgaaattcttcccggcagaggcagcaggcggattgaaagcaatcaaagctatggcagcaccttatagtcagatccgttttatgccgactggtggaatcaatccatccaatgttagcgattatcttgcggaagataagattctggcatgtggaggaacctggatggttcctgcggcagagatagaggcgggaaattttgataagattagagaattgacagaagaagcggttagaagcatgctcggattcagacttgcacatgtaggaattaactgtgagaatgaatcggaggctcatctagtagcaggagcatttgatacaatgtttggatttgcgccaaatgagaatccgagttctatcttttcggcaggatatgtagagacgatgaaaacgccatatcttggaagcaaaggacatattgcaattgcaacatattctgtagaactggcgaaagcttatctggaaagaaaaggtgtaaaatttaatgaaaacagcaccgtttaccgaccggacggaaagatacaggcaatttacatggcagaagaagtgggcggatttgcaatccatctggtaagaaaaccgaaggaagcatagaggcagattacaggaaaggaaagacgaaatgggaaagacaatattatttggtgaaccgatggcgcttctgatcgcagatacgacaggcccgttagaagaagtagaacattttacaagagcaatgtcaggtgcagaagtaaatgtatcgatcggattatcgagacttggacatccggtagaatatctcaccagacttggtgatgatccatttggacattatattgcaaatgcattaaaaaagaatgaaataggaacttctctggttacatatgatgacgtatacagaactgggattcagttaaagaaccgcgtgacagacggaagtgatccatatgcaccatattatagaaagggatcggcggcatcacatattacgatcagcgagattgatgcgattgatctgaccgatgtagaactggttcatgtgactggaattccgccggcactttcacaaagtgcaagaaaagcgaccttccgtttgatggacagagcaaaggaggcaggaatatttattacatttgatcccaatctcagaccggtgttatgggaagatgaagagactatgtgcaccgtgctcaaccagttggcagcgaaggcagatgtagtgcttccgggaatcggtgagtgcaagatattagcaggaacagaagataagaaagaagcagcagatttttatcagaagttgggtgtgaaaacagtgattatcaaagatggatcgaaaggtgcctatgtgcagactgcagacgagaattacgatgtagcaggctataaggtagagaaagttgtagataccgttggagctggtgatggatttgcagtcggagtgttaagtggaattctggaaggattggatctgaaggacagtgtaaaaagaggaaatgcgattggagcaattcaggtaatgaatatcggagataatgaaggacttccgacaccgaaagaattaaaagcatttcaggaaaataactagatagaaattatggatattggacaggagattacctccggaaaaacagagtcggactttgatgtcgcggctctgtttttgtatcgccacgtgttcgtaaggagctgccagtggcaggtcctgtagatcaggggatgcaatagaagcttataaaatgtggaaaaagataagaaatcgccataatcaggttaatttataggtggtaagtacaaaatcaggttgatataatgacattgtaaataagagaacgacaaatgcacggaggaaatcaaatggagattctgaaagtaacagatgcggaatttaagacctacggaaaagttctggaaggatatgatatgaccgatcttctgaaagcaatggagcatgcaccacttccactggatgaagtaatctatgaaccatcgattgaagaactggaaggtctgaagattgcagatgagatgaaagaacgtgcttacggcggactggagatccagatcggatactgcaacggtaataataaaaaattaaatgcagtagaatatcaccgctcctcagagcttgatattgccgtagatgatctgattcttttgcttggatgctgtacttccgaaagatacgaatacagaactgacagaagtgcagaaaaagacaattgaggaagccaaaaaagcagaaggaaagatgccggaagatggattacttaccgcaaagaataaatggctgatcgcacatgaggaagctgagatcgaaggcgcatttaacggcctttgcggagtcaatgtaacagtgtaacggcaaaagtattacagatgaaataaagcgggacgaaaacccgttagaataattataaataaaatatttaggaggaatcacacaatgaacaatatgccagaagtaaaaattggagtagtagcagtcagcagagattgtttcccggaaagtctttctgttaacagaagaaagaatctgatgaaagcatacacagaaaaatacggaacagaagggatctatgaatgtccgatttgtattgtagaaagcgaaatacacatggtacaggcactggaagatatcaaaaaagcaggatgtaatgcactctgcgtatatcttggaaacttcggaccagagatttctgagacattacttgcaaaacattttgatggaccgaagatgttcgtagcagcagctgaagaaagcggagataacttattagatggacgtggagatgcatattgcggaatgttaaatgcaagctataatttacagcttcgtaacatcaaagcatatatcccggaatatccggttggagatgccaaagagtgtgcagatatgatccatgagttccttccaattgcaagagctgttgtaggacttcagaatttgaagatcatcagcttcggaccaagaccgatgaacttccttgcatgtaatgcaccaatcaagcagctttacaatatcggagtagagattgaagaaaactctgagctggatcttttcgaggcatttaataagcatgccggagatgaaagaattcctgcaatcgtaaaagaaatggaagaagaacttggagccggaaacaagaaaccggagattcttccaaaacttgcacagtatgaaattacattaaaagactgggtagaagaacacaaaggatatcgtaaatacgtagcactcacaagcaaatgctggcctgcattccagacacagttcggatttgtgccatgttatgtgaacagccgtctgacagcacagggaattcctgtatcttgcgaggttgatatctacggaacattaagtgagttcatcggaactgttgtaagtcaggatacagtaacattactcgacatcaacaactctgtacctaaagatatgtacaagaacgatattgaaggaaaatacaactatacacagaaagacacattcatgggattccactgtggaaatactgcatcaagcaagctttcattctgcgagatgaaataccagaagatcatggcaagaactcttccggaagaagttacacagggaactctggaaggagatatcgtgcctggagatattacattctatcgtctgcagagcacagcagacaacaaactccgtgcatacgttgcacagggagaagttcttccggtagcgacaagatcattcggtgcaatcggtgtattcgcaattccagagatgggaagattctatcgacacgtactggtagaaaaaggattcccacatcacggagctgttgcatttggacatttcggaaaagaactgtttgaagtattcaaatatatcggagttccggtagatgagattggttataaccagccggcaggggtaaaatatccgacagagaatccatggggataataacggacaggtaataagtaatagatgggactgaatttttcagtcccaaaagtgattatggaggtaaatgatgttatacataggcgtagatcttggaacatcagcagtaaaacttctggtgatggatgagacaggagatattaaaaagattgtttcgaaagaatatccgctcttcttcccacatccgggatggtcagagcagaaaccggaagactggtttgaaaaatcaatggaagggatcaaagaactgactgccgagtgtgataagtcacaggtagcaggaatcagctttggaggccagatgcatggtctggttgctctggataaagatgataatgttattcgtccggcaattctctggaatgatggaagaacaggggaagagacagagtacctgaatgaagtgatcggaaaagataagttatcagaatatacggcaaatattgcgtttgcaggatttactgcaccgaagatcctctggatgaaaaagcatgagccggagaattttgaaaagatcgcaaagattatgctgccgaaagattatttggcatataaactttctggatcgttctgtactgatgtatcggatgcatcgggaatgctgcttatggatgtgaagaatcgctgttggtcaaaagagatgatggatatctgtggaattacagaagataaactgccaaaattatatgaaagttatgaagtagttggaactctgaaaaaagaaattgcagatgaacttggattttcagagaatgtaaaagtaattgcaggagctggagataatgcagcagcagcggtaggaacagggacagtaggagacggaatgtgtaacatttccctcggaacatccggaactatctttatatcaagcaacaagtttggggtagatgagaataatgcactgcattcatttgcacatgcagatggtcattatcatctgatgggatgtatgttaagtgcggcatcatgtaataaatggtggaatgaagagattttaaagacaaaggattttgctgcagaacaggccggaattacaaatcttggcgagaatcgtgtattctatcttccatatctgatgggggaaagatcaccacataataatccggatgcaagagcgatgtttatcggaatgtcaatggatacgacccgtgaagatatgactcaggcggtgctggaaggtgtagcgtttggacttcgtgattctctggaagttgcaaggagccttggaattaagatcgagaggaccaagatctgtggtggcggagccaagagtccactttggaagaaaatgattgccaatatcatgaacctgaaggttgatgtagttgaaaatgaagaaggaccggcacttggcggagcaatgctggcagcagttggctgtggtgaatatccggatgtagagacggcggcagagaagattgtaaaagtagtagacaccgtggagccggatgaagagctgacagcaaaatatgaagaacgttatcagcggttcagaaaaatctatccaactgtgaaatgcttatatgaaaaataagaattttacttccgcagataagccggatatgttagaataatttaaagagtgaaatcttagataaagaggtatgagatgtgtaattctcatacctcttttttgaaaaacggcaatataaaatggccagggaaaaatcagacaattcatatagaagccggtttgaaggagttctgagatggatcacaaaatgaatgaagaaaagaggagaaaaatgaaacatggaaagtcataagattatccaggtagaagaaaaagtaccattgaaactattgctgccgcttagtatccagcatatgtttgcgatgtttggggcatctgtactggttccgtttatttttggaatcaatccagcaatcgtactttttatgaacggcgtaggaacgctgatttttattgcagtgacaaaagcaaagtcaccggcatatttggggtcgagcttcgcatttcttgcaccggcaggtgttgttatcagtaagatgggatatccgtatgcactgggaggatttgttgcggtcggtttatgcggatgtattctgtcctttattatttacaaatgcggaacaaagtggattgatatcgtactcccgccggcggctatgggaccggttgttgcattgataggtctggaattgtctggttcggctgcaagtaatgccgggcttttggatgataagattgatccaaagaatgtgattgtatttgctgtgacattgggcgttgctgtatttggaaatattttatttagaggatttttgtcggtaattccgattttgattgcagtaattgcaggatatctgacagcacttgcctgtggaatcctagattttacacaggtagtagaggcttcatggtttgcaatcccgaattttcaggcgccgaagtttgatatgggggcaattttaatgattttgccggtacttctggttattacatcggaacatatcgggcatcaggttgtaacgagtaagatcataggaagagatcttctgacagatcccggacttcacagatctttattcggggataatttttctacaatggtgtcaggtctgatcggatcagtgccgactactacatacggagagaatatcggagttatggctgtaacaaaagtatacagcgtccgtgttatcggaggagctgcaatattgtctattatatgttcgtttgtcgggaaattgtcgatgatgattcagacaattccgggaccggttatcggaggaatctcattccttctgtatggtatgatcggtgcttctggtttacgtattctggtagactccagagtagattacggaagatccagaaacctgatgttaacatccatcgtatttgtaaccggtctgtctggaatatctgtgaatatcggaaccgtgtcattaaccggaatggttctggcatgtgttgttgccatggcacttagcctgatattctatatcttagataaattaaagcttaccaatgatcgggaagtgtaaggtcttcttttctcatggcgagtgaagcgcccggaacggagaagttaggcatgccgtcttcgtcccagaagacttttcctatataggcatttcttccggcatcgtagagcggctgataatcaccctcacctaagtaacgctcttcctgacgtgcatgatagaccataagatattctgtgtcgtcagtggagcgggtaaagctgttgtgtcctggtccgaagaatccggtagcacggctgctttggaatacaggataaggaagtttggtccaggaagaagaatccagaagatcagagtcttcatctgcatataaaagtcccatattataaagtgcatctgtaccacttgcagagaatgtaaggaagatgcggccgccatgtttgataacggcaggtccttcatttactgcaaatccatgaagttcccagttgtactcaggatgagtcagaagaacagatggagtacagatcgtccacggattggataattttgcaataaaaatatcagaaatattattcgttttctgtgcccatacaaaataatcctcccctttatgatggaagaaagtatggtccagagagaagtcggtaaaagcaatatcattttccacagttgtctggattggtcccttggtgatccaaggatcgttcatcggatcgtcgccggtgcaggcaaggcagtgtggacggatccgccatgaagaatggtcggaaacggttgtggtgtaatatacataccagccaccctggatatagtggatttcaggagcccagaggtgtggactgacacggtcaggaccgatgggctctctttcataaatgactttttctgtgtaacgtccggaattatcagtcagatcttcgagtgtatcggcgcagcggagaatgatgtaaagatactgataagtaccatttaagttgtgcccggcatctgtatgagagccaagaaaataatactttccgtcggtatgtttataaatgtaaggatcggcgcggtgactgatgatcggtgccgcataatcattatcctgaatgtgtccgatgccatcttcgcttcggatgatgttacggatttccttcatcccatttgtatacgtaacctgtacggtctccgggtctgattcgcatctttctacagactgaatacatactggttccggctttccatatttattctgtaaagaactaagggctgcaacagagattgtttccccattagggtcctgggtttcgagtgcgtcggtaacagaaagttcatcgcagggaagtacaatcggaaatccaccgttaagtgcataccagtccttctggttatagctgtattcaagataataatggtctttttctggtttttcccatgagacattcaaggatcgtatgaaagcagatgtctgcttatcatgatagaatttatctgccataggaagtgtaagtgattgattcataaatcctccttgggcattgtatttattagaaaaataaggtttgattcattttagcatagaattaattgattgacaagacagaaaaaagtagtctaagatagtagaaaatggtaacgaatatgtggctttaagcaaaaaatgtgtaaaggggaaataaaaagatggttacgattaaagagatagcaaaagaatgcaatgtctctgtcgcaacagtatcaaatatcttgaatcacaagcctggcgccagtgatgagaccagaagaattgtgatggccaagataaaagagctgaattataagcccaatactgtggcgagaaatctgaagactaagaataccaggacaataggggtaattgtcgaggatatgacgatcttcagtattccggatattgtagacggaattacggaacattgtgaggaaaataattatcagatacttttgatcaatctgagattatttaaaaaatacaatgatttttattatcacagagatgattattacgaccgggttgagcaggaaattgataaattaatcgcaaggcaggttgagggagttatatatgtagctgctcatgaacgtgtaatgaagtgtattccggaaaaacttccggtaccggccgttatggcatacggatatacacaaaacaaaaatatcccgtccattgtagtaaatgatgaagacggggcacatcagatcgtcaaacatctggtcgacaatggccacaggaagataggaattataacaggaaaaccggatagtattcatacacaggaaagacttctgggtatgcagagggcgttttatgagaatcagattctgtataatcccgaaagtgtatattacggggactggaccagacaaagtggttataatggtacggatcagctgttggaacagggggttacagcgatttgctgcatgaatgatcttatggccggtggagtgtatgacagaatggaagaaagaggaatgcttccgggaaaagaggtctcggtaaccggatatgataaccgtgaactttcaggatattataagccgccgcttactacgatatctcttccacttcatgatataggttatacggcaagcgaggtaattatgcgtatggtagaggagaaagagctgaaagaaccggatggtatatatcgtgtaggatgtcatatgctggagcgtagttcggtcagaaatctcaaagaaaattcataatcaaaataataaataatgaaaatcaaaaaaaaataagcacttacagaagaaaaaaatgtctgtaagtgcttattttataatgagtttgtgcatattgcacaaaataaaacgtttaagttctacttgcgcttatcataaatgtgagcgtataatctaatcaaacaaagaaacaggtaaataagataaaaaaatataaacctgtaaaaaaattgcattgtatatttgggaaaaagggaaattgtaaaaaaaggatattaaacgattaaggaaaagaaatcggagttgatgttctgaggaaaaggttatggatggaaagaaactgaaaacagtaccattgaataagatcaagatatcggatcagttctggaacagatatatacatctggtaaaagatgtactgattccgtatcagtgggacattttaaatgacagacttccagatgtggagacaagtcattgtattgaaaactttaagattgcggcgggagaaactgacggagattttgaaggggcagtattccaggatacagatgtagcgaaatggctggaagcggtagcttattcactggcagcagagccggatgaacatttgtcatatcttgcggataaaacgattaaccttataggacgtgcccaatgtgaagatggatatctgaatacttattttacgattaaggatccatcaaaacgttggacaaatctgaaagagggacatgaattatatacggcaggacatatgacggaggcagcagttgcgtattataaagcaaccggaaaaacagagtttctcgatatcatgaagaaatttgcagatctcatttgcaagacattcggaccggatgaaggtcagatccatggatatccgggacatcaggaaatcgagcttgcgcttatccgtctgtatcatataaccggtgaaaagaaatatctggaaacagcaaagtattttattgataccagaggcgtgggagaaaattatttcctggaagaagaaaagagacctgaatataaacagatattcccggaatttgccggatatgatccgagatattcacagtcacatgagccggtaagagagcagaagacggcagaaggacatgcagtaagagccgtatatatgtattgcgcaatggcagatctggcatatgaatacaaggataaagaattgttagatgcctgcaagacattatgggaggacatgacaaaacgtcagatgtatattacaggaagcatcggagcatccggtcttctggaacggtttacaacagactatgatcttccgaacaactgtaattattcagaaacatgtgcatcgataggacttgctcttttcggaagaagaatggcacagatcacaaaagatgcttcatacatggatgtggtagaaagagcgctttataataccttgttatcaggaatagcacaggatggaaagagtttcttctatgtaaatcctttggaagtgtggccggataattgtatcgacagaacttccaaagagcatgtaaaaccggtgagacagaaatggtttggagttgcgtgttgtccgccaaatatagcgagaacactggcgtccatgggacagtacatatatttcactgataagaacacagcatatgtgaacttatacatttctaatgaagctcagatcgaactggaagaaggatcattaaagattcagatagaaagtgatctgacgaatacaggacatattcggatggcaataactcctgatggagaggatgaacacagactggcacttagaataccggattatgtgaagacctatacgattaaaagagacggtaagattctggaaaatgccagaatcagtcagtcttatcttttaatagaagacatcaaagaacagacagagatcgagattgactttgaggtacctgcgaaattcgtaagagcgaatccgaatgtcagagaagatgcaggaaaagttgctctggtaaaaggaccgttagtatattgtctggaagaaacagacaatggggaaaatcttccatctatcttcgttaacacgaaacaggagctgaaagaaacatttgaatccgaacttcttggaggagtaacgacgattcggttcacaggaaagaaactgaacatggatacatggcaggatggtgcattatatgatatcagagaacaggtattcgaagatatagaactcaaagcaattccatatcattgctgggataaccgtaaaacaggcgagatgctggtatggatgaaagaaatgttttaattattttgaatctgtcagggaacatagaccctgtagagaaatatatatctaaaaggaggaaaatctatgaaaaagaaagtagtgtcagtgcttctttgtgttgctatgacagcaactatgctgcttggatgtagcgcaggaagtgaaaagagtgattctaagaaatcatctaagagcgagtcgggcggaacaacagagatgaaggttgacggggatgcaacaaccattaatgtctggacattcatcgagttacaccagaaattctacacagagatggctaagaaatggaatgaggcacatccggataagaaggttaaattagtactttctaatatgcagtacgatgatatgcacaacaaattatcacttgcactggaatcaggaaaaggagctccggatgtagttgatatcgagcttggaaaattcccttcattcacaaatggtaagatcggacttatggatctgacagatgcaatcgcaccatacaaagacaacatagttgaatctcgtcttgacatctacggaaaagatggaaaatattacggattcccaacacacgttggtacaacagttgcattctacaatgatgatctgttaaaagaagcaggaattgattacacaacaattaagacatgggatgacttcaaagcagccggtgtgaaatatcatgagaaaacaggtaagaacttcgcttgtgctgagacaacagctcagtggatggttaaccttatgttagctcagaaaggtactgattaccttgacaaagatggtaaccttgaccttacaaatgataaagttgtagaagtacttcagtacatcaaagatatgcaggatgcaggcgcacttgcaacagtagctggtggacagccggataacgaagaagcttatccagaatacaacagtggtaacttcgcagtacagatcatgcctttctggcagacatcaagatttacaaactacatgtctgaccttgaaggaaagattgcaatcgcagctcctccggtatttggagacaacgatgcagttaagacaatcggtggtggtggaaccggtacagcagttgtaaaatcttctaagaatgcagaccttgcagctgaagtattcgcttacatcaaactgtctgaagacgctaacaaagaagtttggaatgtattaggatttgaccctgttaatacatctgtatggacagacacagaccttacacagaatccggacaaccagttcgtaaaatacttcaagacaaaaccatttgacactctgttagagctccaggatagcattggcggacttaattcttacacaagttctaaatatccatctatcaacaacgagttctgcacaacaacactgaacaacattttcgaagaaggaatggacgtaaaagatgcactgaaacagtctcaggaaactcttgaaaatgaattcggcagcaaataagatttgcaattaagaaattagtaatgtaataatcagggggttgcgtgcaaaaactgccgcatccccttctttttaagaaggaggatacataaaaccatgaagaaatttttctattctcagaaattagctccttatgtgtttatccttccttttgtcctcactgttatatttttctgggcagttccaatcgcgaacggagtccttttaagttttcaggatgtattacaggataaatgggttggattggataattataagagacttctgtccgataagatctttttaaaagctttgtttaacagtacacgttatatgatcggaacactggtacttctgatcccatttccgatgctttttgcaacacttctgaacagtaagctgatgaagaaacctggatttttcaaatccatctatttccttccggcacttacatcagtcgtagttgcaggtacgatcttccgtctgatgtttggtgagatggagacttctcttgccaaccaggtgatcggaatgttcggacttggaccaattaaatggttaaagaatgatctgaccggttattttgcactgttacttctggcatgctggagatggacaggtgttaacatcctgtacttccttgccggattacagagtatttcaacagatctttatgaagcggcttctatcgacggagcaaataagtggcagcagtttacaaagatttcccttccacttctgaaaccaacaaccgtatatgtgttaacgatcagtatctatgcaggacttgcaatgttcaatgaaagttacatgttatggaaaggtaacaactcaccgcagaatatcggacttacgatcgtcggatatctgtacaggcagggaattgaaaaacgagcgatgggttatgcctgcgcggtaggtcttgtacttctgatcatcgttatggtcgtcaatatgatccagctggcagcgacaggaacattcaagaaggaggaaagatagtatgggcgaaaagagaaaaaataaagaccggctttgtacaatattgatgatcgtcttcttctcgatcctggctatcctggtgatccttccgatttatacaatctttcttgccagctttaaaccgggcggagatcttcttcagtatggtctgaaccttggaattgactggagccgtatgagtcttgataactatgtactgctgtttaccggccagcatgattactggagatggttctttaacagtatcactcttacagtcgttacagtagtggcaacacttcttgtaagtgcatttgtaggatacggatttgcagcctatgaattcaaaggaaagaactttatgttcgtaatcgttctcctgatcttatctgttccactggaggttatcatgcttccactgtacaaacagatgacaacatggggactgatggataactatatcgcaattgtattaccattcgttgcacatgcatctacaatcttcttcttcagacagtatcttctgggacttccgaagtcacttctggaagcaggacgaatcgacggagcaacagaatatggtatcttcttcaagctgatcatgccgatcatgaagccggcatttgcagctatggcgatcttaaatggtatgaatgcatggaataactacctgtggccattactggtaatccgttcttcagaaaaatacacactgacacttggactgaacaccctgatcaacccatacggagataactattcactcctggttgtaggttcgttcttctcaatcattcctatctttatactgtttgtatgtttccagcagtatttcatcgaaggtatgacagcaggtgcggtaaaagagtaatcattgtaataataggaggttgaaaatgagtaagacagcaaagatgatcattgataaagatttccagatttccaaagtagatgaaagaatctatggctctttcatcgagcatctcggacgtgccgtgtatgatggattatatcagccgggcaatccgttgtcagatgatgacggattccgtaaagatgtcattgatctggtaaaagaactggatgtaccgatcatccgttatccgggtggaaactttgtatccaacttcttctgggaagacagtgtaggacctgtagaagagcgtccggcgcgtctggaacttgcatggagaagtctggaagagaataagatcggattaaatgagttcgcaaaatggacagacaaagtaaattccaacatgatgatggcagtcaatcttggtacaagaggaattgcagatgcctgcaatcttctggaatactgcaaccatccgggcggaacaaaatatagtgatcttcgtatcaaacatggtgtaaaagatccacataatatcaaagtatggtgcctgggtaatgagatggatggaccttggcagctcggacacaagacaatggaagagtacggacgtcttgcagaagagacagcaaaagcaatgaaactgatcgatccgtctatcgagctggtatcctgcggaagttctgctcttgatatgccgacattcccgaaatgggaatctacaacactggaaagtacatatgattatgttgattatgtatctatgcatcagtattatggaaaccgtgataatgatactgctgatttccttgcatgctcagatgatatggatgaattcatccgtaccgttgtcgcaacatgtgattatgtaaaagcgaaaaaacgtggtaagaaagatatcaatatcagttttgatgagtggaatgtatggttccattcgaatgcagccgatgatgacatcacacagaaccatccatggcaggtagcacctccgatgctggaagacatttacacatttgaggatgcactggcagtcggactgatgctgatcacattgttaaaacatgcagacagagtaaagattgcctgcctggcacagctggttaatgttatcgcaccgatcatgacagatcagggcggcggagcagcatggaagcagacgatcttctatccattccttcacgcttccaagtatggccgtggcgtagcactgatgcctctggtacagacaacaaagcatgatacagcaaaacatgaaaatgttactgacgtagaaagcgttgcagtgtataatgaagagaaagaagagcttacaatcttcgctgttaaccgtacactggaagatgatattgaactgacaacagacttaagaggtatggaaggattccatctggtagagcatatcgtcatggaagaatctgatctgaagctggtaaatagttcttacgaagaaaaagtagtaccaaagacagtaaaccgttcaaagatggatggtggaatcatgacaactcttcttggaaaagcatcttggaatgtaatcagattaagtaagtagaggcggttaagatatgaaattttgggcaattgacagtccggtaatgagagtgcttggacgactgggggatattattatactgaacatgatctttgtggtcggatgtattccggtgatcaccatcggaacttccttaagtgctctgtatgcggtggcgatgaagatggcaagaggtgaagacccgtcggtgtggaaggaattctggaaagcctataagaggaacttcagaccggcaaccatctgctggctggtcatggctgtcattgccatactgctgtttgtggattttcggatcatcggagttctgaaaagaggcagcgaaagtatgtacagtattatgcgtattgtacttgcagtgatccttggaatgtggatgctgatgttccagtatctgtttccatatattgcaagatttgaaaatggaatctttgcaacactgcgcaatgcactgcttcttgcggcagcgcatattccatctacgatcgtgatcgtaggcttaagtgtcggatcgctcatcttaacattgttcacatccagatcctttgtgatcgcaagtattatatgggtgttctttggatttgcggtactggcatatgtacaggcgtttctcctgtgcaggatttttgaaaaatatgaaaagtaaattgtattagtagtgttccaataagattctcggaaagaggacggaaaatgggcaatattacatacggctatatttgcttcattcaaagctgccgcttgtatgtaatattgcccattttctgcagagatcaaagtatgcaggataagttgccgcctgcaggaactgtcaggggcggttccttgcgaatcttccggcagagctgtccggttctgtggtgttatacggctggtaattcgtcaataatctgctgcaggattttttctacagaatcggtaacattggttgcgtatttatcgataccgggagcagcattcgccatggcatagcttgtaccggcggtctgcagcatttcgacatcgttatactgatctccgaatacgacacagtcttttgcttcaatatgtaaatgatcgatcagatcttttaatgcacttcccttgttggcggtcgggcagatgaagtctacccagagattgccggaagtaacaaccttgatgtcagatgaaaacatttcttttagatgtttttcacacgcatcggttccgctgtaatcgcagactgcaatcttaaggatcggttccgggatctcagttcttgggtcatcgatgaatttcatattattctggatgacatttaccatgtgattatagaactccggatttttcgaggtgctgtagcagacacgttcgccggagatgatgcagttgtattgtggatattttgcaacttcatccaggatacggtaagcaagatcctgctcaataattcctttggaaatagtctcttcgttgtatatacagagagaaccgttttcggcgatgtatgcaatatcgtcctgaaccggagtgaacagtctgcgaagattcaggtactggcgtccgctggcagccgcgaacatgatcccatgttctttcagtgtacggatctggtcgaacacaattggattgacatcgtgtgcgccattttgaagtagtgtgccatcaaggtcgctggcgattaatttaaccataaataactccttatataaaacatttctgaaaacattgatatttatttcgctactaattataatataaatgagtaaaatatgaaagacaaaggtaggaacaggaatatgaagattggaattgcaaatgatcattctgcagtagacatgaaaaatgagattgtagaatatctggaaagtctgggacatgaagtcgtgaactatggaacagattcttatgaaagctgtaattatccggaattcggtgagaagatcgggaatgcagtggcaagcggtgaagtagagcaggggatcgcaatctgcggaaccggtgccggaatctcactggcagcgaataaagtaaatggaatccgtgcagtagtgtgcagtgatccatatacagcaagaatggcgaaagagcacaacgatgcgaacgtgatcgcattcggggcacgtgtgatcggtatcgagactgcgaaatgcatcgtggatgagtggcttaatgctaagtttgaaggcggaagacatgccacaagagtggacatgatcatggacgtggaaaagagaaatcataatttatagaatacatttttgagatatagacatattatggatatggaggaagagactgctgacggtggtctctttttttaggacaaaaaacgacacgcagaggttgtgtgatctgcatgccgccttttatatcatattatattggagaaatgaaaaaatgataatatctgttttaaaattaccttttataacttatttctggtgagctgcttcgtactctctgaaagcatctacctttggctgagaagagcatcccggaacgaattcgtttgtcaggaaagcgtctgttaattcttctcttaatttgttaccgattgtgaaagctcccatacatgcgatgttggcatcgttgctgagacgggctcttttcgctgagtagatgtctgaaagtaatgctgcataagcgccttttactttattagctgcgatagaaactccaagacctgttccacagatcaggattccacggtcatactcgccggaagcaacagcttctgcaactgcaactgctgtgttagcatagatcggatcttcgcttccgaagtctttgatctctccataacccttatcttccataaatttgatcagttcctcttttgcctgctgtgcgtttggatcacatccgattgcgattttcatagtgaatatcctccttagatataaaaattaaaatgttttaatgaattactgtttgctgaaatattttcctgcttaatatatgtcttctatattaagcagctttattttgcatcgtgcgctttgatcgcatcgcggatcaaagtgtcgaatttgtctgcctgccatgcagcacgtcctgtaaacagaccatcgatggatggctgaacgatcagatcacatgcgtttcctggatttacgcttccgccgtaaagtgccggaatttcatcggctgcatcaccgaagatctcgtgtaatgtttgtttgatgactttgtgcatctcttctgcgtaatcggcagaagcaggagttccgttgactccgatagaccacacaggttcgtatgctacccagatgttctttgcgtcttcgacagatacaccatggaatcctacttttaactgtgtacggagtacttcagcactgatgccgaattctttctcttcagcagtctcgccgatacataaaagagttttgaatccatgttccagtgcgcagagaactttcttgttctcttcgatatccgtttcgccaaatacatgacgacgctcagagtgtccgatcatgacaagtccgatgccagcctcctgtaacatcagaggagaaatctctcctgtaaactgtccctgttcctcccagcacatattttgtgcgcctaagcggatgttcttctggtcaatagcttttgaagcactgtccagagttgtataagaaggaataatgaaaagttcaatctcatccctgcttatatcttttgtaagagattccagctcctgaagataggaaacggtatcttttatgttcttgtacattttcaagttacttccaaagaaaagttttttactcatgataccctccagtttcgatattttgttttcttttgcttgttttgattatatctctaaaatagaagaaaagcaataataaaaacgaaaataaacgaaacaaaatgaaaataaagccaaaaaagtgacaaaaccttaacaaactactgaaaaatgcacaaaaaatgaaaaatgaatctatgcaattgtgataaagttacgaaaaagcgataaaaactattgcaaaaaacaaaaaagaaatgtaagatatagacatcgaaacgaaaacaaaaccgaaagcgaaacgaaaaagaaaggaaagtaaaaaattatgagtacacagtataaaccaattacagcaatcacaatgggagatcctgcaggtatcggacctgagatcgtagtaggaacaatgttaagtgaagaaatccacgactgctgccgtccattcgtaatcggaagcatcgcaatcatggaaagagctgcaaaggttctcggaaaagaattgaaatacaacaagatcgaagatccatcagaagcaaaatatgaattcggaacagtagacatcattgagactggtgattacgatacagactctatcgaatggggaaaagttcaggcgcttgcaggacggatggcagttgactggatcatgaaatcaatcgaacttggacaggcaggaaagatcgatgcagtttctacagcaccaattcacaaaggagcaatcaaactgatcggcgtaaaagaacctggacatacagagatctatcagaatgcaacacattctccatatgcactgaccatgttctcatgccacaaattaagagtattcttcgtaagcagacatatgtcactggtagatgcatgtcactacgctacaaaagatgtcatcctggaagatgtcatcaacatcgataaagagttaagaaaagtcggaatcgagaatccactgatcgcagttgcaggattaaatccacacaacggagataacggattattcggacgcgaagagattgatgagatcgagcctgcggtaaaagcagctcaggaaaaaggaatcaatgcaatcggaccttgcccggctgactccgtattccacattggaaaatcaggtaaatttgatgcaatcctttctttatatcatgatcagggacacatcgcttgtaagacattagactttgaaaaatctgtaacacttacattcggacttccattcatcagaagttctgtagatcatggaacagcatttgatatcgcaggtaaaggaattgcaggatgcatcagtatgatcgagtctacaaaagtagttgcagaatacgcagcaaaacagcacgagaaaaaagaagcttaatcaaaagtgataacaaggtaataacagaggttcacaaaaggggtggcggatcccttttgtgaacggctcatatgtgaacggatagaaagagaggaaagtgccatgcctttgataggagcagttgcagatgacctgacaggagcaacaacgacaggcgtattattagcgagatcgaaagcaagaacagcagtattttttaatgaggaagcagcacaggaagcaagagagacagcatctctggatgcaatcctgatcagcagtaactcaagaccacttccaaaagaggaagcatatgacaaagtaaaatcagctaccaatgcgttaaaagcaatgggcgtaaaatacttttcaaaacgtatcgatacaactttacgtggcggcgtaggagtagagatcgacgcaatgttagatcagttaaatgaagatacgatagcagttgtcgtaccggcaatgccacagtccagaagaatccttgttggcggatattctgtgatcgacggagttgcactgatcaacacaccggttgcacaggatgtgcgtacaccggtaaaagagaattacataccaagacttcttgcaggccagaccagaagaaaggtcggactggttacattagatcaggttctgaaaggaaaagaaggaatcaaagaagctcttactgaagtaagaaatgatggcgcaggtgtcattattgtggatgcgatcacattggaagatgtagatcagatcgcacaggcttgtatcgatcttgactgggacgtagtcgcagtggatccgggaccgtttacttcaaaacttgcatacagaagaggactcattcaggaagaacagccgaatgtaccaccggcggcaagtgaagaaggtaagactgttctgatcgcagccggaagtgcaacaccggttacgaagaagcagatgcaggtattatgtgaagattccagacatgtcagaatcagtgtagaaccaatcccgctgatcaatggtggagatgaagcgttagatgaagcgttcaaagctgtgaacaaggcagttgaactgatcgaaagcgacaagcagccaagagcgatcctgttcgaaacagcgcttcacggagaacttttaaatctggacgaagaagataaaaaacgtggctatgcaggcggaatgagtgcgaaccgtatcaatgccggacttggaactattatctcacaggtactggaacaggtaggaagagagaaaatcgccggtctgtatactacaggtggtgacacgatggtaaatgtatgctatcagcttggagttgagtgcatcgaagtgatggactacgtaattccacagacagacgtcggaagattagtcggaaaatatgacggacttccggtcgtaggaaagggcggacttacaggtaatgacaatacagcctgcgatatcgttgaacgtctgtttaaagaatcggcaagatagcatcgggggataccatcctgatcataaacgttaaacgcatcataaagagaaaaggagagagaaaatgagcgaagaaaaaacacaggttcagaatgcaagaaaagatttagacattctgaataaaatgaaaaacctcccgggaggtctggtaatcatcccattggtaatcgcagttgtacttgcaacatttgtaccacaggtattccagattggtggatatgtaacagcacttttctatgaaggaaatgcatgtatgatgggattcttcctgatcgtatgtggatctatgatcgacatcaaacaggtaggtatgccgctttacaaaggtgtaattatgacaggtaccaagttcttacttggagttattgttggtctcattgttggtaagatctgcggaccagaaggattcctcggaatcgcaccatttgtattaattgcaacaattacaaactcaaacggatcactgtacatttccctttcttcacagttcggaaatgcaacagatacaggagctatctcaatcctgtcactgaatgatggaccattcttcacactgatcgctcttggtgcaacaggacttgcaaatatcccgatcaaatccctgatcgcagtattagttccactgcttatcggatttatctggggaaatcttgacaaaggattccgcgatgcttgtaagacagctcagccgatcgtaacattcttcatgaccatttcaattggtgcgaagacagatatcaagacaatcctgacagcaggtgcttccggtatcgtacttggactgatctctgcagcaacagcagttatcttcttcttcgtaatcaaccttcttcttccaaagaaggaaagaaatgcgatgggtgcagccatcggtacaacagccctgaactcagctatgacacctgctgcagttgcagaagctgacccttcaatggaaggaatggtaagtatggcaacagcacagtgtgcaacagcatctatcattaccctgttcctctgcccgttcattacagcagcatttgataaatggatgcagaagagacagaaaggtatttacagtccggaaggatgggcttacgataaagtaaaagcaaactaatctgaaatagcaatatagtacgagtagtacaaacatttccagtccttttatatgtcaaagtataaaaggacttttctaaaaaagagataaataaaaatcaacaggaggtaatgttaaatgagtatggtagaaaaagagacaaaagtagtgaatgagaataagatgatggtgaatatgacaaaagaagcattgtatgacttccttttattccacgcatattccaaattcagcggatttctggtaaatatactgggacttgcagttgcatttatgggaatcttctcgtatacaaccggaagagtgagtggcataggagcggcgctttatctggtggcagcggtaatattccttggcggcacaccgttccagcttaagatgagagcaaaaaaacaggttgttgtaaacagagaatataatgcgccggtagaatatacattttccgaaaaaggaatcacactcgagcagaatggagaaagtaagacatacgagtgggaacagatcgaacgtgcggtagttacgccaaagacaattggaatctattatgcaccggaatgtgcgatgatacttccaaaagaagatttcggagatcagtttgtaccgatttttacaacaattgcaacacagttaggacagagtaaggtaagaatgagataacaaatgttctcaaaaaggagctgtctgtatgcttgacaattgatataaaaagtgtaaactgatttattaagaggatagttgcggggaggctgccatggaagaacgtagaaatgagatattaaaagaacttgacagaaaaggaagagtaaaagttacagatctgagcaaagaattcggctgctcagaggtaacgataagaaatgacatcaaagcgatggatatagaagggttgttgaaacgtacccatggcggagcagtaaaggtcgagacagagacggaacggaagtattcggcagagacgatctaccggaatgttacacagaagaagcagattgcagaggcagcatatgaatttctggatgacagggatacgatcattattgatgatgcatcaaccagcttttaccttgcacaggagattaagaatcatccggagaagcggatcgcagttgtaaccaattctctgattgcgggaaatgaacttgcgggagtcggacatgtggaattgttcatgatcggcggatatgtaaccgggcatctcgctgccacgatgggagatgtggcaattcagaatatgtcaaaatttcatgtagataaagcgtttatcggagtgcacagtattaatttcaatgtaggacttacatcgattgccacaccacagatggaagtgaaaaaggcgatcatgaaggcggcagagaaagtatatgtactggcagacagcagtaagtttggcggaggctatctgtctgtaatctgtccaacgaatgaagtggataagattattacagatgatggagtatcaaaagaggatatccagaaggcaaaagaactggatataccgttggttatcgcgtaacgggagaggtacggatggaaagacagcagaaagcctataaaggtgtcatagactattttaaaaagaagatcatggacggagaattgcgtccgggagaaaaattgccgccggagagagacattgcagaacgactgaacgtgagtcgtaattcggtgcgggaagcaattcgtatcatggatatgacaggagtgatctcttcacagcagggatcaggaaattacattacatgtgagttccagaagagccttgcggagaccatgacaatgatgttcgctatggatcagatcgattataagcagatcagccagattcgtcaggcactggaatgcctggcattttcgcttgccatagaacatgcatcggacgaacagataaaagaaatggaatcattggtaaaagagctggataaaagtaccgatgatgtaaagaatgcggctctggataagaagcttcattttatgcttgcacaaagttcggggaatattctggtactggattttctggaagcgtgttccggcgttatagattcgtttattcatgatatgcgtgcagcgattctgcgcacggaagaacggaaaaaattgttaaatgaatgtcataaaaaattgatagaagcactgaaagagaaagatgaaacgaaaggtcaggaagcattaaaacgccattttatgctgatcaatgagattctggaagagcgggaaaatagaaaaatatagggagcataaaaggaaagaggctttgccaagaagccatatctcagagaatcccttccgacagaaaacctggaattgatgaacggaattaagagggtgtttgatccgaagaatattttgaatccacacaaagttgcacagttataaattactgtcagatagaagaacttttgacatataatttcatattttatagcagatgggagtatatcctgtctgctattattttgcatatctataataggaaaggaatggaactatggcgtattcgatcatgttggatgccggacacggcggtgcaaaagatcctggagcagtctatgaaggacgtcaggaaaaagatgacaacctgaaacttgtgctggcaattggagagatactgtcggacagaggactggatgtagaatatacgcggacaacagatgtctatgaaacaccttatgagaaggcgatgaaagcaaataatgcgggagttgatctttttgtttctattcacaggaattcgtttcctgtagataatgaagtggaaggtgtggaaagcctggtctatgatctgtccgggttaaaatatgaaatggcacagaatatcaatgagcagctggaaggtgtagggtttgtgaatctgggggtgaaagcaagaccgaatcttgtagtcttgaaacgtacaaagatgccggcggtgctggtagaagtcggattcatcaattcggatacagacaatcagctgtttgatgataatttccaggatattgcacaggcaatcgcggatggaatcctggatacactggaaagtaacggcctgatccaggaagaaaaagttccggtgtaccgggtgcaggtgggactgttccgcaatcagcgctatgcgaaccggctgctgaatgagctgctggaacaggaatatccggcatacattgaccggtccggtccgtatcacagagtctatgtgggtgaatttgacaacctgaatgatgcggtacagatggaacggcgcctgaaacgggcaggatatcagacattgatcgtacaatgaaaaaattaacatagatttttcattactgagatattctatttaacatagccttcttatacttgaatcagcaaatgagatagagagaagattcaaggaaaacgggaggcgttttgagatgaaaagtttatggaatatgttgaataaagaatttacaatagaaggagcggtcagtgcatttctggtgatcaatatcattgcctggacgctgatcacaatgggagtagggatgctggtttgtaagttccttggattctcgattggcggtaacatgacgaatcttatgtgtgcgggaatctatggcggtctgatcgtgggattgatcggaggaatcctgtatctgtatgagttatacagacatcattctatggaataataagaataaatatataattataatgtaataaaaagatctgctttacagaaaaatgtagggtagatctttttgtgtacagaggttttctgtatgatgaggaatggaaagcagattgacatggcagtattttcataatatgatggaattactttgagaaaagatgaagaaacaagagtatcaggagagacggaggattatcaatatggcggatagattggaatttaaagaaaaactggcgggaattctggcgctggcagaaggacagaatggaaaaatcacagtagatgaagtggaaaaatactttgaagaagacggactttcgcaggaacagatgaatctggtctgtgattatctgttatcgatgaagatggcggtagtcggatacaaacagaccggagggacggtaaaagaggctgagaaagaagaaaaacagccattaagtgcagaagaacagaaatacgtggaagaatatctgcgcggactcggggatatgaaagaagagacacaggaagaagtacgtatggcttattatctgccgaaagtagtggaagaagcggtcagattgcatcatccggaagtgtttatcggtgacatgatccaggagggaaatatagcattgatggtcgcattgaaagagattccgaaggaaaaagacgaagaagagattctggagcaggtgcgtgccggaatgatggcttccctggagtcgcagacagaggtgaaaagaagagatcataagatggttgaaaaagtgacagaacttgatgaagcaattaagagtatgaaagaagagtacggacggaaagtcagtgtagacgaagtggcagaacgtctcggaatcagtgaggatgagatcgaagatattctgaaacttgccggagaagaggtaaaagacgaagaataatgagatatgaaaaaggagacggggttaatcctcgtctccttcttcatcttccggtttcggttccggcagatataaatgtacgctttcgattctgtttttatctaatttttctacaaccagatggatgccgtcttcggtggtgacgccgtcgccgatctcaggaagacggtccagatgctcgataatgaatccaccgacggaatcatactcttctgaggtcaggtcaagatcgagcctgtcgtttaagtcatccagattcgtggagccttctacgatgtattcccgctctccgatctgctttatgaagtcttcttcattctcatcatattcatcatgaatttctccgacaatctcttccagaatatcctccagtgtgatcagaccggaagtctcaccgtattcatccagaacgatggcaatgttaaaagaagcctgacgcatctccacaagtaattcggaaatgttcttgtattcgtaagtgaaataggcctcacgcataaagtcgcggatatgaaactctttttccttatcatataagagaaggtctttcatattgatcgtaccgataacgttgtctgttgtatcttcaaaaatcggaagacgtgtgaatttgtcctcgcggaaaatgtcgatcaattcttcgtaagtagcatttacatcggcgaatgtaacatggactctcggtaccatgacatctttcgcttttgcgtcgccgagatcgaacacgttatagatcatctctttttcatcggattcgatgacaccgctttcatggctgacgtccacgatcgtacgaagctcagattctgtcatctggttattcttcgcatttggatcaatgtggaggacacgcagaatgatatcagaaagcttgttgataataaatacaaatggtgtcatgaccttgatgtacagattgatgaccggagcataacgaagagacatcttctctgcatgcagtgtagccatcgtctttggtgtgatctccccaaagataataataagtacagataaaacagcacttgccactgctaccatagaaccgccaaggttgtaagcaagggttgtggtaagggaagcggcggaaagattcaccacattattaccgatcaggatcgcacttaacattttactggtgtcatctgtgatgtgcatgacggtcttcgcttttttatttccctcgtcggcaagaccacggatacgcatccggttgaccgtcgtaagagctgtctccgcagatgaaaaaaatcctgaaagtatcagtaaaatcaatagaataatgagctgtatcgcgacactcgtgtccaattgtaaaatccactcctttaaaaaataaatacttggcattaatatacagcatttacgccaaatttgcaagtgtacgttgaatttgcgatacgtttagtgtaagatgtagttattgtttgagggtgggaattttttggactgaaaattctgtatgatataataatggttggaaaaaagcaacctgctgatgaaaagggtggagatgagaatgaatcaggaattaggaaagaaattattaagtattttaaaagaggaacaggtaaaaaaagacgaaccgatgaaaagtcacacgacatttcgtgtgggaggtccggcagattattttgtgacaccgcagacagcagaagaagttgcgaaggtgatagaagcatgtacacaggaaaaagttccttattatatagtgggaaatggaagcaatcttctggtatcggataaaggatatgagggcgtgattatccagatctataagcagatgaatcaggtaaaagtggaaggtgcacagatccatgcacaggctggtgcgctgctttcgatgatcgcaaagagagcgttggatgcagaacttaccggatttgaattcgcggcaggaattccaggaacgctcggcggagcctgtgtaatgaatgcaggagcatacggtggagagatgaaagacgtccttaagtctgtaacagtactgacaggtaaaggagaagtgaagacgcttgccaaagaagaactggaactgggataccgtaccagtgtgatcgcgaaaaaaggatatatcgtattagaggcagtgctcgaacttcaaaaaggcgagaaagaaaagatccaggcagtgatggatgatctgaaggaaagacgtgtgacaaagcagccactggagtatccaagtgcaggaagtacattcaagcgtccggaagggtattttgcaggaaaactgatccaggatgcagggcttcgtggtttccaggtaggaggagcacaggtgtctgaaaagcattgtggatttgtgatcaataaagatcaggctacagcatcagatgtgatgaatctgatgaaccaggtgtctgataaggtatatgaagagtttggagtacggcttcagccggaagtaaagagactgggagaattctaagatgagatgtgtgattgttaccggaatgtccggagctggaaaaagtacagcacttaagatgctggaagatatgggatatttctgtgtagataatctgccggtgccgttgataccgaagatggcggagctgttaagtgttccgggcacagagattaataaagcggcacttggagttgacattcgaagcggacagaatttttctgaacttgaaaagattttaaaagatctggaccagtcaggaaccagatttgagatcctttatctggaatcccgtgatgatgttctgatcaaaagatataaagaaacgagacgttttcatccgttgtccggaaaaggcggcagggtggaagaaggaatcagggaagagagaaaacgcctgaagttcttaagagaacgggcagattatctgattgacagcagtcatatgctgaccagagaactgcgtgcagagctgtcgaagatttttgtggaaaataaggaatataagaatctgtatatatctgtgctgtcgtttgggttcaaatatggaatcccggcagatgcagatctggtatttgatgtaagatttcttcctaatccttattacatagatgaacttcgtccaaagagtggtaatgacagagaagtcagagaatatgttatgaataatgacaaagcaagggagttccttgcaaaattgacggatatgatagaatttctgattcctaattatgtacaggaaggaaagacacagcttgtgatcggcatcggatgtacgggaggaaaacaccgctcggttacgctcgcgaatgagctgtacgaggcgcttcagaagaatgataattatggtatccggatagaacaccgagatataggaaaggatgctattaccaaagcgaggtagaagatcagatgtcattttctggaaaagttaaagaagaattgttagagcattatgcccgtgcgagacattgtgatattgcggaattatcggcaattgttcacatggcgggagaatttaaggtgggacacggaggtgtatgctgccttaaggtgcatacggaaaatcttggagttgcgagaaaatgctttacattattggtaaaaacgtttaatataaaaactgatgtcgtagtccgcagaaatacgggaaaggataactacagctattatatttacgcaaaaggtgaagaattgctggcgatacgtgacacgatcgtgcaggcagtctgctgtaaaagggcatatataagaggggcatttattgcatcggggtctatgagtgatccaagtaagtcctatcattttgaaattgtctgcaatgatgagaatcaggcagaacatctgaaagagatgatgaacagttttggcgtggatgccaagatcgttcagcgtaaaagaacatatgtggtatatctgaaagaagggtcacagattgtagatatgctgaatgtgatggaagcacatgtggctctgatggaactggagaatgtacgtattgtgaaagagatgcgcaattcagtgaaccgtaaagtaaattgtgagacggctaatattaataaaaccgtatctgctgcagtaaggcagatggaggatattacatatatcagagatcagatcggttttgataagttgccggagggattaagagacgttgcccttacgcgtctggcgtatccggaagcagctttgaaagaactgggtcaactgatggcaagcccgcttggtaaatcaggggttaatcatcgactcaggaagttaagtgaaatagcacaagggttaagggaacagcaaggaggagcaagtcgttatgattagaaagcctgttaccattcaaaacaatatggacatggaagaccgtccggtggctcatcttgtacaggaagcaagccagtacgcgagccaggtatacattctgatgggaagcaaaaagattaacgcaaaaagtattatggggatgatgagcctgaaacttcagaaaggtgaggatgttacgatcatagcagatggccaggatgaagatgcagccgtaagtggtgtggcaacatttcttggagcacagaagtaatacgggagaataatatagaaacgatatgtaaaataaaggggccgttgtgatggaagttgcaatagcctcttcgttattaagaaagataaggaggaggaatgtttatgaagcgtttgctttttatctataatccacatgcaggaaaagaacttttaaaaccgaaacttgcagatgttattgatatctttgtgaaagcgggatatgaggttgtagcatatccgacgcaggcataccgtgatgcctataaaaagattaaaaaatatgactcaaacgaatatgatctggtcgtgtgcagcggaggagacggaacgcttgatgaagttgtgaccggtatgatgaagcgagacagggataagagggatccgatcggctatatcccgaccggaacaacgaatgactttgcaagcagtcttcacatcccgagaggtttgctggaagcggcagataatgctgtgaatggagaggtattttcctgcgacgcaggaagatttaatgatgatatttttgtgtatattgcggcatttggactttttacggatgtatcgtaccagaccaaacagtcaatgaaaaatgtattgggacatttggcgtatgttctggaaggggcgaagcgtctgttcaacattccttcttacaaagtgaaagtaacacatgatgatgaagtgatcgaagatgaattcgtatatggtatggttacgaattccagatcagtcggcggattccgtaatctggtcggaaaacaggtggggtttgatgatggcgtgtttgaagtaacattgatcaagacaccaaagaatccgatcgaattacaggagatcattgctgcactgatgattcagcagatggattccaaatatatgtatacgttcaagagcggacggatcatgtttgaatcgattgaggagattccgtggacactggatggggaattcggcggtgaacatgatgaggttgtgattgagaacttgaataaagagcttcagatcatggttccgggaacgcatgaagaagactaaaaatccatgaattgtagaaaaatccaaaaaatttaaaaaaattaaaaaaagtacttgcctttttgcaaaatccttgctatactaggcaagtaccaaacaaatggctccgtggtcaagcggtcaagacgctagcctctcacgctggaatcaggggttcgattcccctcggagtcactgatgaagatctgcagaatgttctgtagatctttttttctttttaatctaagtatgtaagagaaaaggctgaggataagttctcggtatatcactaaaatactcgaagcaaatctaataaaatttatttattaatattatagatgaaatctataatataccctttatataaagaaaaacaatttcaacaaacagacaataaatgctactattgaagcagtcagaaaggaataggaattatgaaaaatcttttgatagtatctcattgtattttgaataatgcggcaaaagtagaacaggatgaagctgagttggctgaagaatataaaatccgtgaagaactgatgcagcttattttgaaaaaagatgtacagctgcttcaattgccttgtccggaatttattatgtatggatctcagagatggggacatgtgaagaaccagtttcaacatccattttacatggaacaatgccgtaaaattcttgaaccggttctgcttcagttgcaggaatacgcacaacatgtggaaaaattccatgttctggggattgtttctgtagagggcagtccgaactgtggatatcatctaacctgtgaaggagaatggaaaggtgagattggtacggatgaaaaaagaatacaggacattcagaaatctctgaaaatgacagaaaatccgggtgtgtatatggaagtactggaaaaagaacttcaaaaaagaaatatggaaattcctattgtgacgatgaaagaagcagtgcaactgctgaacaactaaaggttagagagaaaagaggagaacaaaatgaaaaacagaaaagtctatgtaacaactttttgcggtgttgcagtagcaatgaacatcgtgcttggaattatcacatcggcacttggaatcccgttatatctggatacactgggaactgtgctttccgcagcaattcttggtccggtaccgggaatcattgtaggagcattgagtaatattattacggggctgatctacagtgtgtcagatatcccattctgtctggtaaatatggcagtcggtctgatcgtaggtcttgtggcaaaaaaatggaaatttggaatcgtacctgcagtgattacaggtattgcgcttagctttatctgcccggcaattggaacaccaatcggaatctatgtatatggtggtctgaatggatctgtatctgatatgctggtaatgtcactggtacagggcggaaaaacaattttccaggcttcattccttagaaatgttgcatcaaacttaatcgataagatcggaacatgtattattggatgcctgctcattaaggcgatgccgatgagattcatggataattttaagaaagaggcataaatctcatatgataaagattgaaaatctggtacataagtatacgatatggaaagatgaaaatacaaaaagtgagaagacagtattggacggaatatcattagatattccgtctggtcagtttgtggcaattttaggaccgaatggttccggaaagtctacattggcaaagcatttaaatgtactgctgcttccgaatgaaggaacggtatggattgacgggaaagatacacatgcaaaagaaaggctctgggaaatcagaagtcaggttggcatggtatttcagaatccggataaccagatcattgggacgagtgtagaagaagatgttgcatttggtccggaaaacaaaaatatagaaccggaaaaaataagaaaaattgtagaaactgttttgcgaaaagtgaagctgtgggatcggagaaaggcgtcaccttccatattatccggcggacaaaaacagagactggcaacggccgatgcgctggcaggacttccggcatgtctggtgttagatgaaccgacagctatgcttgatccggattcaagaaaagaagtaataaatatcgtaaaagaattgaatcgaaaagaaggaatgacgattattctgattacgcatcacacggatgaagtagtagatgcagaccgtattgtattgatgaaggatgggaaaatcatcggggatgacattccgaagaaaatatttgcggattacgaattgttaaaaaaggcaaaaatggatattccgccggttgtagagttgggaatgagattagaaaaacagcaaattggattagagggtccggttttacaggaacaggaaatgatcgaaaaaatcgtgaaattatacagaagtaaatgtggaggcaaaaaggatgctgcaaggtaaacatatcacattttcttattcagattcggcaaaagggaagatagatgttttgaaagatgtctcatttgagattagagaacatgattttataggactgattggtacatccgggtcgggaaagacaacattgatcaagcatctgaatggtctgctgaaggcggaatcgggagagatctttttcaatggggaaaatatatatagtaaaaaatatccgatttcaaaattaagaaaagaagttggtcttgtatttcagtatccggagcagcaattatttggcaggacgattctgaaagatgttatgtatgggccgctgaatcttggaatgagtgaagaagaggctgaaaagtctgcagtagaaagtctggagcttgtcggaatctcaaaagagtattatcatttgagtccgatggaactttcgggaggtcagaaacgatgcgttgcgattgcgggagtactggcgatgcagccggagatattggtgttagatgaaccggcagcaggacttgatcctgaaacaaaaaatgaaatattcgagttgttgtgcaggataaggaaagaacgaaataatgcaattgtattggtttcgcaccatatggaagatgtagctcaatttgctaatcgggtatgggtgatgcatgaaggaaagatcgcaatggatggcactccggaagaagtatatggaagagtggaagagttagaagaaatgcatataggaatcccgcagattacgcatttgacatattcgctgatacaggaaggtctgcctttgccgaggccggcaatcaatgtagcggatgctgaagagatgctggtgagaatatttaaaggagagaaggaaagatgattcgggatattacgattggaagatattatgattcggaatctgtgattcaccggatggatccgagaacaaaactgatgggagttctggtttatattatttctttatttcttgtaaaaaatgtctggtggtatctcggatgtctgattgtaatgctggttctttataggcttgcaagagttccagtgggatatttgttaaaaggattaagaggaattcttgttctgctttgctttacttttctgttccgtatgctgtatacaccgggagatgcggtcgcatctgtttggatatttaccataacaaaacagggaatatggaaagcagtgcagatgacagcaaggatagctttgatgatcacaggtgcgtctctgctttcttacacttcaacgccgaaagaactggcagatggtctggagaaggctttttcgggattggggaagattggagtcccggtacatgagatggcagtgatcgtgatgatagcatttcgttttatcccgattatgctggaagagttaaatgtgttgatggatgcacaggcggcaagaggtgcaaggtttgaagagggaaatgttgtcgaaaaatgtaaaggggttatgacgttattgtttccgctgtttctgatgacggtcaggagatcatcggatctggctatggcgatggaagcgcggggatataccggaagcacagaaacttcaagaatgtatccgttgacatataaaaaagaagacagggcaggatacattgttatcttgatatatcttgccgttttcataattggccggataagtttcttgtttttttagaagttatgatatataatgcaagtgaaacaaatttgtcatagtgaaagtagtaatacttatggcatcaagaattggaggaataacatatgttagtatcagcaaaagaaatgctcgataaggcagtagaaggtcattacgcagtaggacagtttaacatcaacaacttagagtggacaaaatctattctccttacagcagaagagttaaagtcaccagttatcttaggtgtatctgagggggctggaaaatacatgacaggattcaagactgtagcagctatggttaaagctatgatggaagaacttaacatcacagttcctgtagcattacaccttgaccacggaacatacgaaggatgtaaaaaatgtattgatgcaggattctcttcaatcatgttcgacggatctaaatatccaattgaagagaacgtagagaagacaagagaacttatcgctatctgcagagaaaaaggaatgtctatcgaagccgaagtaggatctatcggtggagaagaagacggagttatcggtagaggtgaatgtgctgatcctaacgagtgtaagatgattgctgatctcggtgttgacatgcttgcagctggtatcggtaatattcatggaaaatacccggctaactgggaaggattaagctttgagactctggatgctgttcagcagctgacaggaaaaatgccattagttcttcacggtggtacaggaattccggacgatatgattaagaaagcaatcagtctcggagttgctaagattaatgttaatacagagtgccagctgtcatttgctgatgctacacgtaaatatattgaagcaggaaaagatctggaaggaaaaggatacgatcctcgtaaactcctgaaaccaggtgctgaagctatccaggcaacagttaaagagaagatggaattatttggttcagtaggaaaagctgaataattaaaaattttcacttgccttttttgactggttgagttatactaactggcataggaagaacaaaggcgttccaacggaagttggagtgccttttttcatatcatggtatgcacagaaagtacatacaacagattttatgtataccatagtgtgaaacttatactataaataacaatgagaaaggaaacgaggagacatgagtgaagcaattaatgtagccaagatatttggcgaagacgtattcaatgacactgtaatgcaggaacgtcttccaaagaaagtctataaggatctgaagaaaacaattgaagaaggtaaggaattagaccttgctacagcagatgtaattgcacatgagatgaaagaatgggcaattgagaaaggggctacacattatactcactggtttcagcctctgacaggtgtaactgctgaaaagcatgattcatttatttcagcaccacttccaaatggaaaagtactgatgagcttttcaggaaaagaactgatcaaaggtgagccggatgcatcttcattcccatcaggcggacttcgtgcaacattcgaagcaagaggatatacagcatgggattgtacatcaccagcattcgtaagacatgatgcagcaggcgcaacactttgtatcccgacagcattctgttcatacaaaggagaggcacttgatcagaaaactccacttcttcgttctatgcaggcaatcaatgagcagtcgctgagactgttaagattgtttggaaatacaacatctaagaaagtaactccttctgtaggaccagagcaggaatattttcttgtagatgcagataaattcttacagagaaaagacttgatctatacaggacgtacactgttcggagcaatgcctccaaaaggacaggaattagatgaccactacttcggaaccatccgccagagaatcgcaggattcatgaaagatgttaacgaagaactctggaaagttggtgtaacatctaagacacagcacaacgaagttgcacctgctcagcatgaacttgcaccaatctatgcagagtgtaacgtagcactggatcataaccatatcgtaatgcagactctgaagagagttgcatgccagcatggtatgaagtgcttacttcatgagaaaccatttgcaggagtcaatggttctggtaaacatgataactggtctcttacaacagacgacggaaagaatctgttagagccaggaaaaactcctcatgaaaatattcagttcttactggtacttacatgtatcctgaaagctgtagatacacatgcagatcttcttcgtgaatctgctgcagacccgggaaatgatcacagacttggagccaatgaggcaccaccggcaatcatttctgtattccttggagaacagttagaggatgtgctggaacagctgatcagtacaggagaagctacacacagtctgaaaggtggaaaacttcagacaggagttgacacacttccggatcttgcaaaagatgcaacagaccgtaacagaacatcaccatttgcattcacaggtaacaaattcgaattccgtatggtaggttcccgtgattcagtcgcaggaccaaacgtagtactgaatacaatcgttgcagaagcattctcagaggcttgtgatgtccttgaaaaagcagataactttgatgaagcagttcatgacctgatcaagaaatatgcgacagagcatcagagagtggtattcgacggtaatggatactcagatgcatgggtagaggaagctgaaagacgtggacttccaaatatcagatctatggtagaagcaatacctgccctgactacagacaaggctatcaatatgtttgaaaaattcaaagtatttacaaaagctgagctggaatcccgtgcagagatcaaatttgaaagttatgcaaaggcaatcaatattgaagcacgtactatgatcgatatggcaagcaaacagattattcctgcaattattaaatatacgaaagaacttgcagatacagtagttgcagtaaaagaagccggcgcagatgcatctgttcaggcagaacttctgacagaagtatccggattattagcagagtctaagaaagcgctggaagcactgaaggttgtaacagatcaggcagcagctatggaagagggagaagatcaggcaagattctatcactccgatgtagtacctgctatggaagcactccgtgcaccggttgataaactggaaatgattgttgataaagaagcatggccgatgccttcttacggagatctgatatttgaagtataaacaaaaaagagcaggtcattcgttagacgaagaaattattttagaaatacattagaaaaatttaagaaccctggacttggaatggacacatgattgtgctattctaagttcagggttttttataccaaagtatgtaaaatcctgtaaggagggcaatcatgacaaaacgggaatttttagataaattaaaaaaagcgcttgcgaatgacctttcgggaaatgtaattcgggataatgtggattattataatgattatattacagaagaagtgcgaaaaggcagaaaagagtcagaagtaatagaagagcttggcgatccatgggcaattgcgaagaatatcattacctcggaagaaatcaagggaaatacgggggaaacatatgacagctatgagccggaaagacagagaagccagacgtatgaacagggctatgacgaggaatcaggacacagagtgcatgtcttcggacttgatacatggtggaagaaactggtgcttcttcttggaatcattggtgttatcgtattagttgtggctgtaattggaggaatcatcagcattctggcaccgatatttgttccgctgttgatcctgtgtctgatcttaaagctggtgaaggattccagaaggtgagagagcggaaagactcgttgattttttgaaaatttgatatatgcaaaaataaaagaccgatgggggagccatcggtcttttgaggggagtataaataattaataaggggttgtagaaagtattctttctacaacaacagtataatatagtaaaatgtaaaaatcaagaaaaatattaaaaaattcttaatatatcgccggatgtataatcagtgaatgacaggacatactaatctcgtagcaaaaaagattaggaggaattcaaaatggctaaaaattacaactcatcagaaaactgtcataacgcatcagacaagaacacatcaaacaaaaatgcatccagaaacacatcaaataagaattcatatggaaaaaatgcatacgataagaatgcatcgaacaaaaacgcatatgataaagatgcgaaagacaagaattcttataattacggaaatgaaaacagtcagtattaggaaaaagctttccggacaggacgtgcaaacgcacgtcctgttttggggtttacatacgatatagcaaaacatattgacaaaaactattacttgtcagtaagataaagaagtagaaattaatatttattatatggagaaatagatgaaaaaaatggaattgatcgctccctgtcattttggattggaagcagtattaaaaagagagatactggatctgggatatgatatctcagaagtagaagatggaagagttggattttggggagatgcggaagcaatctgccgtgctaatatattcctgagaactgcagaaagggtgctcttaaaagtaggaagctttaaggctaccagttatgaagaattatttgagaatacaaaggcactcgactgggaaaattatataccggaaaatggaaaattctggattgcgaaagcagcatctgtaaaaagtaaattattcagtccatcggatatccagtcagtaatgaaaaaggcaatggtaagaagacttcaacagaaatatcatgtagagtggtttgaagaagacggtgcggcttatccggtaagagtttttctgaaaaaagatgtggtaacggtcggtatcgatacatcgggagtatcactgcataagagagggtatcgtgaagttgcgggaaaagctccgatcacagagacgcttgcagcggcactgatcatgctgacgccatggcacaaagacaggattcttgtagatccgttttgcggaagtggaacatttcctatagaagcagcgatgatcgcagcaaatatcgcacccggaatgaaccggtcatttacagcggaagaatggacgaatctgattcccaagaagctttggtatgatacggtgaatgaggcaaatgaactgatcgatgatgacatagaagttgacattcaagggtatgatgcggatggttctgtaattaagattgcaagacgcaatgcaagagaagcaggagtagatcatctgatacattttcaggaaagagatgtaaaagatttgagccacccgaagaaatatggatttattattacgaacccgccatatggggagaggctggaagataagaaagacctgccggcattatataaaacatttggcgagagttttaaaaatctggattcgtggtcagcatacatgattacttcttatgaggatgcagaacgctatttcggacgaaaagcagatcgtaaccggaaaatttacaatggaatgttgaagacatatttttaccagttcctgggaccaaaaccacctaaggcaaagcgtccgggagaaaaacaggagaaaagataagatggaaaaaattatatttgcgacgggaaatgaacataaaatgatagagatccgtgcgatcctgagtgatctgggagcagagatcctgtcacagaaagaagcggggattaaggctgatgtagtagaagacggggcaacttttgaagaaaatgccatgatcaaagctacagagattgcaaagattgcaaatcagatgccagaatataagaatgcagtggttctggcagatgactccggacttgaaattgattatctgaacaaggaaccggggatttattctgcacgttatatgggagaagatacttcctatgacattaagaatcagacattgctggatcgtcttgagggagtccctgatgaaaaacgtacggcaagattcgtatgtgcgattgcagcggccatgccggatggttcctgtgaagtggtaagaggtactatggagggaattattggccatgagatcgcgggagaaaacggatttgggtatgatccgatattcttccttccggagtatggctgtacaagcgcagaactttcaccggaaaagaaaaatgaactgagccacagaggcgagggactaagaaagattcgtaagattctggagcataaataaaagttagggtgaagatatagatatgaaaatattgatcataagtgacacacatggctctcataagaattttgaccgtgtaatagagaaagaacggcccttagatatgctgatccatcttggagatgtagagggggatgaggattatattccggctgttgcagattgtccggtacatatggtgcgtggaaataatgactttttttcagatctgcctggagaagaagaattcatggtagagggatatcatatatttacaacgcacggacacgggtattatgtatctatgggagaaacgcggttgaaacaggaggcaagagggcgaggagcggatattgtgatgtatggccatacgcatcgtccgttttatgaaaaggaagaagggcttattacattgaatccgggaagcctttgttatccaagacagccggggagaaagcctagttatatgatcatgcagattgacagtaacggaaaacttgaaattacgcaggaatatttaaattagaatataataaaaagtgcggaaaccattgatttttcaagaaaatccgcacttttgaaaaaaatataaaaaaaacaaaaaaagttgttgacaattagtatgaggtcatatataatatgtcttgtgtcacggagctgatacaaaatatgacacaaaagaaacaccatcggggtgtggctcagcttggctagagcgcctggtttgggaccaggaggtcgcaggttcgaatcctgtcaccccgatacgctatgcgggtgtagttcaatggtagaacaccagccttccaagctggatacgtgggttcgattcccatcacccgctctcctgaaacaattgtttcgggttgtggttaagagatatgagtctgtagctcagctggatagagcaacggccttctaagccgtaggtcgagggttcgaatccccccaggctcgtttaaaccactaaatttaatatggtgatacttagttggacaaaagacagttcgataagtaatatggtgggtatggtgcagttggttagcgcgccagattgtggttctggatatcatgggttcgagtcccattacccaccctttttcttttttattgggctatcgccaagcggtaaggcacaggactttgactcctgcattcgttggttcgaatccaactagcccagtttattatgggcgtgtagctcaggtggtagagcacttgacttttaatcaagttgtccggggttcgaatccccgcacgctcagtacgaatgcaggtttttcaaaatgaagaatctgcattttgtttacacgcggatatggcggaattggcagacgcgctagacttaggatctagtgtccatgacgtgcaggttcaagtcctgttatccgcatttgcagagacattgccggttgcaggcagtgtcttttttgataccaaagtatgcaagagaagttgccggttgccaaagcgcccgtaaggagctgccggtggtagatccggtaggtggcaagttcactgtatagcaaaataaaaatcctgaagtttttcttgattagaacttcaggatttttgtgtatagcttctatattatttgattataaatttacgtatgatacagcttacaactccggcgatacagatcggaagcagtgtgtcttttaatccgccgtatacagtcagagcattatgaatacccagaagtgcggcaggagcctgtgggatgagtacggcaaacattgcggacagatatgatccgacagcaatgataataaaggatgtaagtccacgcccattatcaatactgtttcctctgcgtccctgtttcttgcttcctccgagaacgcagaaaaagatgatcacttcatagagcaataataccgcaccaatcgccagatatgcgatcagttcctgatccgctgatgttaagcgggaaacaatattgccaaacgaaccggcattggccagaaaatgcagtcccaaaagatagatgatccaggcaatcagcagaagtgttcccattcttaacagaagattgatgaatttgaataggatctttcctccggctttagcggtttttgcaaccggttttgcaacatttggaacttttacaccacgatttttgcggctttttttctctttctgtcggttgttacgaggatcgtcgtagtcgtcttcatactcattatcgtagtcgtcttcatattcatcatcgtaaaggtcatcatccagctcgtcaaagatgtcgtcatcatagtaggcggtatcaaagaagttatcttttttactttgttttttgtttttcttaccagccttcttatttttattctttaatttctttgttagtctgtcgtaatcattttttttgatgtaatctgtatgatcaatatccgataatcctgatagtacatcgcggtagtcatcgtcatcatcaatagaaatatcaggaagatcaccttcgtagatcacttcgaaatcgtcgtcgaagatatcggaagtagattgtgttttcttcttattacttaaactcattattagtccctcctatttatacccatctcttattttataatgtttgaaaaaaactctcaagagtggtcacagaatattcacgaagttgtaagaaaaactttagatttgtattacatgcaataaaagcttaacagatatgaaaagatgtttattgagaaataagaaagaatcacgtataatgaagtttattaatataatgatacgggggtaaaatgtcttttgatcctattatcatataataaaaaggagagagtatatttgacagagttttattatttcgcattatcattttttgtatatggatttctgggatggtgtacggaagttgcatatgcagctgtgaagcagggaaaattcgtgaaccgaggattcttaaacggaccgatctgtccggtatatggaatcggagttggtgttgtagtacagtttctgacaccggttgagaataatctggtattattgtatatcagttcgaccatacttgtgacggcaatagaaggaattaccggattcctgctggagaagatctttcataataaatggtgggattattcagaccagccgttgaatatcggtggatatgtatgcgtgttgttctcattgatatggggcgtgttctgtgttctgatcgtaaaagtgatccatccgctgatctacaaggtgttgacaatgattccatttgttcttggaattatagttatggcatgtctggctgtcggacttctggcagacctgtatgtaacagcttccgctattctgaagatgaaccgcaaacttgaaacgatggagaagattgcagccgagctgaaagatctgtctaacaaggtcggagagaatatctatgaaaatgtaatggaaggtatggaattccagaaagagaagaaagagcagcttggtaatgtaagagaagagctgaaggaacgtctggaggagccgaaggcgatcatgaatggtctcagagacggagtaaaggaacgcctggaagaaccaaaagcccgtatggagaaactggatccgaagatcaatgtagaagagatgaaggcccgtatggaagagttaaaagcaaaatacgaagagatggcagagaaccgtacaaaggttggcgaacgtcttgtgaaagcgttcccgaagatgcaggtaaggcagcataaggagatatttgaggagctgcgggagcgggtgcggcggagtaaataaatggctatttagttcatcaaaccggctatatactgtgttcttcaaggaccgagaggccaacttcgttaatcaattaaataacaaaaaaaccttgaagaatgaatcttcaaggttttttgcatgcggaaaaagggacttgaaccctcacaggattgctcccactagaacctgaatctagcgcgtctgccattccgccatttccgcttgacaaaaagtatcttaccatagtctgacggaaaatgcaaacgttttttgtaaaaaattgaaatttttttaattttttcttcaaatacgatttttagccgttctaattaatctcaatcccatttacctcaagatgatcatcaatcgcaatcaccagacagcggcgaccgtcaatctcacgtgtctctaccagatcggcacgttcgggattaactttgactaccacgtccggtgtctcaatctggaaagtcttagcactggcaatgttggatgcaagcagtgtaccatgtacaccgactgtttcatcaaattcatcatcgaatgattccagcttttcttcggcaacaccgctgcgtgtcaggagcttcttgacatcggtcttggataattccagcggttccggttcttccttggcctgttcgatcatttcgtttaagttatcgtggatattgcggaccacttcgtagttactgtcttcgccgagggtgtcgcttacgattgcctggaaggttgtcttctggtcgcctgcagtcagtggtgttgtgcttccaaggacatgttctacgaaatatggctgtaactcttccggtttcttcgtataataaagaacattatgtacatcagctgcacgatcctggaaggccgggaataagaatcctttgaccggagcctctacgaaccagtcgcggatgcggtcttcgatgttatttgtctgtgcattgtatgtaagtccggcttttgtaagattgaccgggcagatactgcagaggatgtgttcgtatacagtgtcggatgcatcttccatctccagaccatctttcgtcttgcccggaacatcgtatacggcatggatcaggatgatatagtagttctcgccgtattcataactttccacaactttatcatagaattcttcgagaagaaggtcgtcctgaagcttgctgttctttaatttcatcagaaattcctgtgtgccgccgttcaattcctggtcgagtgggaattccatgttgatgaggttctttccgatcgttccggaaagtgtatgtttgaagatatcaaaatatttgaaagcctcttcttccggtaaagataagaaggcttttttcatttccatttttttctctttttcgtgatcgacatagcatccacagatacgtgtgatggcgcaattttcaggagaaaactgtttgcggatctctaatacttcttttttgttcatatttgtcacttccttattattatatgctgggaggatattttaaccccggtatcataaaatgttagcatatcagccgggaaaaaacaatcatagaccattgtaaaagatggggcgggaacgtataataataaatagaatatgtcaaaatacgtaactattcaacactggaaaatatggggaaagggatagttatagtaaaaaagaaagggaaataagaatatggggaatatattcgacattttaggaccggtgatggtaggtccatccagctcacacacagcgggagcagtcaggataggtatggttgcaagacagttgttcggccgtcagccggagagggcagaagtctatttacatggttcttttgctgcaacaggaaaggggcatggaacggaccgggcgctgatcgccggattattggggatgatgccggacgatatgcggataccggacagctacgaagttgcaaaagacatggggatggattttgtaatgaagaataagaacatcaagggtgcacatccgaatactgcccagattattatggaagcagagggcgtaccacagatgaaaattcaggcacattccatcggaggcggacgtatctgcgtctgtaaattagacgggattgatgtgaatttcagtggagagagctgtacgcttattatccgtaatgtggacgaaccgggacgaatcatggaggttgctgccgcgctcagtaaagccgagatcaatgtggcgaccatgcaggtgttccgtgacaaacgtggcggaacggccgttatggttgtagagacagaccaggtgatcccgcagagtgcgatcgatgaactggagagcaagccgggaattatccgtgtgaaatttcttgatccgaatggatcggtatagataatggaggaaaagaacatatgtcatatcagtcaatggaagaggcgaaactgagaggggaaaaagagaacattccattctggaaagcaatccagttagaggatgcacaggaacgggatgtgaagattgaagattcttgggaaaagatgaaatacatgtggcagtccatgttggacgcgctggacgcatatgagccggacaaggtatcaagaagtggtctggtcggaacagaaggcgggcttatggacaattaccgtgagaatgaagaaccgttgtgtggggattttgtctcaaaggtgatgtctaatgcactgaagatggggtgtaataatgcctgtatgaaacgaattgttgcggcacccacagcaggagcctgcggtgtacttccggcagtacttgttacttattataaagaatacaatgtttcggaagaaaagatgatagaagccatgtatgtggcagccggacttggtcagatcattgccaaccgggcatatcttgcgggagcatcgggaggatgtcaggcagagatcggttccggttcgggaatggcagccggggcaatctgctatatcaaaggcggagatacggatcagatcggacatgcctgtgcgatggcattgaagaacctgatgggacttgtatgtgatccggtaggaggtctggtagaggtaccgtgtgtgaaacgtaatgtaggcggtgcagtgaatgcgctggcggcagcggacatggcactggcagggattacaagtaaggtacctgttgaccaggtgatagatgcgatgaaagaagtcggagacaagatggacgtatcattgagagaaaccggtgtcggtggtgttgccggaacacctgcagcacaggaagtagtagaaaaattagggatgtagcgtaagctacatcccctttttaagagagcgttgtttttaaatcggtgctatgaaaataagcgtgtgctttatcgaataatttgttgcacaggaccgtataaacagaaccaaacaggttggcaccaattcggagtgctactgcatatggcattccaaacagaccggacgcaatggaaagcgctccaaatgtattgaacactgtctgccaggaatatcctgccgaatatccgacaccgattccgccaatgattccgatataggcatacatagacttcggaagaaccgtatacagaacaatgaataacagacctcctacgatgttgaacatccaacgctttccggaacgtgcgacacagtcatttgtaaacggaagacacacggacatacatgcgatacctgcccacatagctcttggaagtccgagcagggacatgatgagcatcgctgatgatacgatgaatgtcagcttgatataccatctgctgcgtgcggaatgaatgttgaattcctggaacagatgagaaaatttacgccggtaaggacggttcttctgattcttatagaaaatgatcatgcagaggatcattccgacaaggagtccttccagtcttaaaatgtaggcatgtccgcttacatcatatccaaataataatagatagccaaggacaaaagtagagtgattgtacatgatcacattgtggcatccgaggatcatcagcagcatgatacagatcacattgacaaagaatgccggaaccggtgataccatgttggcaagacggggacctgccataaggattgcgtagatacctgcgatagaggcaagcccgtgcgtggtacggattccgaaatcggcctgcctgagaaccagcacggccagaagcacggtaactccgacaacactgttgtcatttccgatgaatttactatataaagatacaacggcgacacagaataccattacaagatatactttaaagttgtaaatgagtatgtgacggcgtttttcttttttatcggttgtgtttttaatcagctgtttagagccggtcgagcttagttgtagttcctggtaaaatgtcataataaaatctcctttattttttttgtgaagaaagaatctcgttcgcttcacggattagttggaataaagtctcgaatttctctttcttcatatttttctgtaatgtatagagtggatccagatagtaatagtacatacggtcaatctcatcttttccggcaccggtaatgcggatgcagtaactgcggcggtcggacgcagaggcctctttacagataaaccctttggattccagatggtcggtcaggcggcttacgatagtcttactgatgcccatagcgttggtaatctgtcttggggtcagtggttcttccgaaagcgcgatccggaacagaaaatcaatctcctgagcagaagtgtgctctgattttccggatttccggatcgccatacttgcgaaatgccggaggtcgccttgttttgatacgatatcggtccagtttttgtctttcatagttgctcctttataatagtttactttgtaaacaattgcgataagtactataatagatataggagaaaatgtcaaggggatctatggaagtatctttggtttataaaaataaaaaagtttgtaacgaattgaggaaaaatgactcttaatagtaaaagaagatataaatgagagaagagaggtgagttcatggaatcttttgaggaagtatatcagaaatatttaaaagaggtatattgttttctgctgagattatccggagacagggaaatagcagaagaacttacccagcagacatttgccattgcatttgaaaaattggaaaatttcagaggtgaatgtaaattatcggtgtggttatgtcagattgctaagcatgaatattatgcgtggacaaaaaagcagaaaagatatgcaaataaattagatgaaaatcatgcagatcaaggggaggatttattaaatggcataatcaatcaggaaaatggacagatcatccgaaagattctacatgacttacaggaaccgtacaaagaagtattcatgctgcgggtgatgggagaggtatcatacagagatatcggacagttattttcaaaaagtgaaagctgggcgagagtgacctattacagagccaagaaaatgattgtagaaaagatgggaggcgcaggcaatgatgaaatgtgagattatcagagatctgataccgttatatctggataaggtatgcagcgaagatagcagaaaactggtggaagagcatttagcagaatgtagtgaatgcaggaaatatatgaaagaattagagacggaactggaagcggtgaaacagaaaaaagaagaagatctggatgaaaagcggttgttacaggaaggagcggagcgtatgaaggaaatcggcaagaaaagtatcgtagataagatgattattgtggatacattactaaatttcttattgatcgtaacggctgtagtattgtgcaaacggcagatagatatcgaaggtgccgatgcgggatattatatagcagccatggtattcagctttggatttattatcgcattcttcatatgtgactgcatcacactggttcagaaatggaagagaagaaaaatgcagacggagtgggagtataaacagattccgatctgtgaaagttatgcgaagatatctataggcgtaaaagtaatcattgtatttatgctggtatgtgcggcttgtatattgggattttcacagtttggaggaatgttttctatttaatgcattatggcggctgtcaccgatcggaataaacttacaaggtcctatcctgtgctgactccaacatggggaaattctaaagcaaaaaagttgacctaaaaacgagctcacaaaaaatccaaactcgacattcgtctcagacagtggatttttgtgagcaaacggtcaacttttttacttaagaatttccaaccatgagtccgtatgcacaggctgggaccttgtagtnnnnnnnnnnnnnnnnnnnnnnnnnnnnnnnnnnnnnnnnnnnnnnnnnnnnnnnnnnnnnnnnnnnataggaccttgtaagtttattcctgcggtttcgcatgccataataattaaatggagaactgtaagcttttattagggttcggggatttggcctagtgaattaaatagaaacttgacaactatagttgtcatctgttagaatttaaatgacaagaaaagttgtcaaaatatgattgataaaggagatgagcatttgcctttactaaaccgattgaaggaatacagatcaagacttggcgtcaatcagaccgagatgggaaagctcgcaggcgtatccagacagacgatcagccagatagagagaggagactattcgccgtcagtaacacttgcgttaaagattgcgaagatttgtgaagtcagtgtagaagatatttttatatatgaagaggagataaatgatgaaggaaaagaaaagtagttattttaccgcaacgtggaagatgctcgcggcagtgataatcgggggaatcgccggaggcgtgtcggtagtcatctatgaactaatgaaaaaaggaatagatgcaggaatcagaacgattaacggaacgattcagcaatatatatttccagctctgattataatcgcggttgttacggtagttgtgggtgaatacagtttataccggttaaagaatgtatacaaagaaatgaaggatgcagatgaggacagattctatgaactggattacgaagaagaaaaatggggagcgtggaccagtggggttaatttggtgtcacaggtggcttgcatcataattttatcctttggatattctttgaagtatatagaatcaggaaaatccagatattttttattcgcctgtattatatttatactgtgctatttctacgatatttatctttctgtacgttatgtaaaagcgatacaggctgctcatccggagaaaaaaggtgatccaacttcaagcaaatttacggaacagtgggtggaaagctgtgatgaagcagaaaaagaaattatatacaaaagtgcatataagacgtatattgtattgaacaaagtaataccgatattattgttgcttacattaatagcaaatatgttcttgaatactggtatattggcggttcttgttgtagctgtcatttatctggtcacaggaatgacgtatatcagatcctgtatggtttcaaaagcgaaaaagcttggataacgtgcagttggcaggttctattgcagacttttgtatgtaaatgaaggcatcaggtaagttctgatgtcttcatgagagaaaattctatataataatcagttgagttaaggaacatttcgttccaatcatgaaacacatcaataaaaatatctcaaaaaattttcaaaaaatataataaaaagaataaaaatgttgaattatcatgtattcccagtatgggaacaacgttaatatacgcaggatagatactatatgaagtatagaacttgaagaataaaattacctgtgaatatacttgataatataattattgtcgtgttgaaatactgtaaagataagtttatactaaaaggagaagtttatgaatcatacaaatttattcaaaacaggttctgttaatgaacggttccaatattatgaaaagttagtcgcggagctgacaatgatgagtgatatgttcatgcggaacgtgttaaacattctggaatgtgcggaatatgtattaagagttattactgaaaatgatgatctggaattaacagaagttgttgttcagaaagattacaagaatttacaggggagatcagccatacttgactgtgtggctgtgaatggcagaaaagaaatatatgatatagaagtacagcaggaaaaagccggagcaattccaaaaagattgcgatatcacagcagtataatagatgtacatagtctgtatacaggagaagagtttgaaaagctgccggaatcgaaggtcatttttattgtagatgaggaatcagatgctggagttgaacctatcttacatatcaaacggactgtaagagaaacaggcggagattataatgataaaagcgaaattatatatattaatgccaggatgaaagaagacacagaactgggcagattgatgcatgattttcattgtacaaaggcagaggacatgtatagcgaagtattggcaaagcgggtaagagtattgaaagagacacgggaaggagtggaaaccatgtgtaaagagatggataagatttatcaagtaggtgaagaatgtggaaaagaaaaaggaaaatatgaaacagcaatgaagttgcttgaattaggagcaagggaagacatgattgcagaagcagtaggacatagtgtagaagaaataaaacgttggaagaacgatatgaaacgtcagtaatgatattgtaaaaaattagaaagatggaaaaggagaatctatgatgaaagtatttgcatacagaaaatgcagcacctgcatgaaagcattaaagtggctggaagcacacaacgtagaatttgaagaacgagcaattaaagaagaaaatccaacttacgaagaattaaaagaatggtacacaatgagcggacttccactcaaaaagttctttaataccagtggtatgatatacaaacagatgaacctgaaagacaaattaaaagaaatgaccgaagacgaccagttaaaactcctggcaaccgacggaatgctcgtaaaacgcccattagtaatcggagataatttcgttctgaccggcttcaaagaaaaagaatgggaagagaaactgctataagttaaaatatattatcataattatatgaattccaggtaaacaccagannnnnnnnnnnnnnnnnnnnnnnnnnnnnnnnnnnnnnnnnnnnnnnnnnnnnnnnnnnnnnnnnnnnnnnnnnnnnnnnnnnnnnnnnnnnnngaaaaataaaaatatattttgacattcaaaatacttgacaaacaaaatttcttgatatatactttgaaagtcaaaataatttagaatcaaaataaatcagaggtatttataatgactggaagaatatgtgggacaggatcttgcgtaccatcatttgcaatggacaacaatgacattgcgaaactggttgataccagtgatgagtggatccgggagagaaccggagtcgtgagacgtcatattatcagagaagagacgacggtatccatggcagccgaagccggaaggcaggcacttgaaaatgcgggaattgctgcagaagatgtggatctgatcatcgtgtctacgatttcttcaaatgtaatacttccctgtacagcctgtgaagtgcagaaagaccttggggcaaagcatgcgacatgttttgatctgagtgcggcatgcaccggatttgtggttgcttataatacggcagcggcttatctgaatgcgggcgtgtatcagactgcactgattattggcagcgagagtttatcgaatctgacgaactggaaggaccgcgggacgtgtatcctgttcggggatggcgcaggagcggcagtgctgaagcgcgaagatacgggatattatcttccggtaacacactccgatggctttagaggagaagcacttcgctgcaaaagcagatatgacagaagcgaattatcaccggaagatatgccaaagccggaagaaaaagaatatctgatgcagatggatggaagagaagtatttatgtttgctgtaaagagcgtgccgcaggcaataaaagaagtattggaaaagaatgacacggcacaggaagaaatcagtttttacatcttgcatcaggcgaacagaagaattgtagaagcaatcgcaaagcggctgggtgaaccgatagaaaaatttccgatgaatctggaagaatacggaaatacatcttccgcaagtattccaattcttctcgatgaactgaaccgagccgggaaactgaacagaggacagaagattatcctggcaggatttggggcaggactcacctggggggccagcattctggagtggtaagaagcctcagataagcaacccttataagtgcaaaagaattaaaaaggaaccagagctaaaaaagagacaaaaacagaaataaaaggagaacaaagatatgttagaacagattaaaaaaatggtagcagataacttaggagtagaggaaagcaaaatcacagaaaacgcatcattcaaagatgacctcggagcagattccttagatctttttgaactgacaatggcactggaagatgaatatggaatcgagattccgtcggaagatctggaaaagatcgtaacagtcggtgatgttgtagagtatgtgaacgctcataaagagtaagaaaattataaaaaggcagggagtatagagattatgcagacagaagtaaccagattattaggaattgaatacccgatcattcagggcggtatggcctgggtggcagaataccatctggcagcaggtgtatccgaagccggcggactgggactcatcggtgcagcaagtgctccggcagactgggtaagagatcaggtatgcaaggcaaaagaactgacagacaaaccattcggtgtcaacatcatgctgatgagtccttatgcagatgaagttgcaaaggtgatcgtcgaagaaggcgtaaaggttgttaccaccggtgcaggtaatccggagaaatacatgaagatgtggaaggaagccggcgtaaaggttattccggtcgttgcttctgtggccctggcaaaaagaatggaacgctgtggtgcggatgcactggtagcagaaggttgtgaagccggcggacatatcggcgagagtacaacgatggtacttgttccacagattgtagatgcagtcagtattccggttattgcagccggaggaattgccgatggaagaggaattgctgcggcattcatgctgggagcaaaaggcgtccagatgggaacacattttgttgtaacagatgaatcccaggtacatgagaattacaaagaaagaatcatcaaagcgaaggatattgattccagagtaacaggaagaaccacaggacatccggtcagagcccttcgtaatgatatgacgagaaaatatctggaactggaaaatgccggagcaggattcgaagaactggaaaagctcacacttggcggcctcagaaaagcagtcgtagagggtgatgtaaagaacggaagcgtaatggcaggacagattgccggcatggtaaaagaaagaatgtcatgtaaagatctgatccagaaactggtaacagagacagatacattaatcggaggacagggattctatgagtaagattgcatttatttatccgggacagggcgctcagaaagccggcatgggagccgacttttatgaaaacagtgagattgcaagatacatatttgaccaggcaggtgaggaacttgatctggatatgaaggaactttgctttgaagaaaatgacaggctggatttgacggaatatacacaggcagcaatggtcacgacctgtctggcgatgacaagagttgcggaaagtaaaggactgaaagcagatatcacagcaggattaagcctgggagaatacccggcgatcgcagctgccggaggaatgaacgatatggatgcaatccgcctggtaagaaaaagaggaatcctgatgcagaacacggttccggcaggagaaggagccatgtgtgcggtcatttctatggcggcagaggaaatcgaaaaagtgatcgaaccgattgctgatgtgtcggtcgcaaactataactgtccgggacaaatcgtcatcaccggtaagacagacgctgtagaagaagcggctgcaaagttaaaagaagcaggggcgagacgcaccattatgttaaatgtcagcggaccgttccattctcagatgctggttccggcaggagagaaactggcggaagaactggaacataccagatttcacgaattaagaattccgtatgtaacgaatgtaacagcagagaaggtaacagacatcagagaaactccgggacttcttacgacacagatcagttcaccggtgcgctggatgcagagcatggaacgcatgatcgcagacggtgttgatacatttgttgagatcggaccgggcaagacactggaaggatttttaagaaaaatcgaccgaagtgtgaaagtattccacatttcccagtgggaggatgtggataaagtctgcaccgaacttgcagatagtggaaagatgatggaggaagcttaaagatgagtcagacaatggaaggaaaagttgcggttgtaaccggagcgtccagaggaatcggaaaagcaatcgctgtaaagcttgcatcaaaaggagcaacagttgtgatcaactataacggttccagagaaagagccgaagaagtaaagaatgaagttgagtctgcaggcggtaaagcggtgatcatacaatgtaatgtggccgattttgatgcctgtaaagaattcatcgagacggtaatcaaggagcagggaagaattgatattctggttaataatgcaggaatcacaaaggatggactccttatgaagatgtcagaagaagattttgataaggtattggacacaaacttgaagggaacatttcatacaataagagctgcgctccgccagatgatccgccagagaagcggacgcatcataaatatggcatctgttgtaggtgtcagcggtaatgcaggacaggcaaattatgcggcgtccaaagcaggtgtgatcggactgaccaaaacagcagccagagaagtggcatccagaggaatcacggtcaatgcagttgcaccgggatttatcgagaccgacatgacagaagtacttccggaaaagataaaagaagcgtctgccgcacagattccgcttggaaaattcggaaaagcagaagatgtggcgaatgcggttgcatttcttgcgtcagaggatgcgggatatattactggacaggtattgcatgtagacggcggtatggtgatgtaaaggagattaagatatatgaagagaagagttgtagtgacaggacttggagcagtgactccgatcggaaatacggtagaggagttctggagcggcatcaaagaaggaaaagtgggaatcggagagattaccaaattcgacaccacagaatataaagtaaagattgcagcagaggtaaaagattttcaggcaaaagacagaatggattttaaggcagcaagaagaatggaaccattttcccagtatgcggtggcagcggcaaaagaagcattcgaagatgccggacttgatatgtcaaaggaagatccgttccgtgtcggtgtaattgtgggttccggtatcggaagcctgcaggctgtagaaaaagaatacgaaaaaatccggactaaaggaccgggaagagtcaatccgcttctggttccgatgatgatctcgaacatggcagcaggaaatatttccattcagctcggtctgaagggaaaatgtacgaatgtcgtcacagcatgtgccagtggaacaaactgcatcggtgatgcattccgtgcgatccagtatggtgacgctgaagtgatgctggcgggtggagcagaaggatgtatctgtgagaccggagtcgcaggattcacaagtctgacagcactttcgacttctacagatccgatgaaggcatccagaccatttgataaagacagggatggattcgttctcggagaaggtgcaggtgtagttgttctggaagaactggaacatgcaaaacaacgtggtgcagtcatctatgccgaacttgtcggatacggttctacgggagatgcatatcacattacttctcctgcagaagacggaagcggtgcagccaaagcaatggaacttgcgatggaagaaggcggaatcgaaccttcccaggtggattacatcaacgcacacggaaccagtacacatcacaatgacctgttcgagacacgtgcgatcaaactggctcttggcgatgcggcaaaagatgttgtgatcaactcgacaaaatccatgatcggtcatctgctcggtgcggccggaggtgtggaatttatcacttgtgtgaagacaatccaggacaacttcatccatcagacagtcggaactgaaactccggatgaagagtgtgacctgaactatgcgatcggtgcgccggtagaaaaagaagtcaattatgtactgacaaattcacttggatttggcggacataatgcggtgttactgttaaagagatatgaagactagcggagaattgcaggagggacaaagacatatggaaatggagaaaatgatcgaactcatagatgctgtgtcaaagtcagatctgacaggctttaaatatgaggaagacggtatcaaactgcatttgagcaagaaagaaaatacatgctatgtgacggaaagtgtgtctgcaccggtgaatatgaccggaacagcttctgacggagtggtttctgctgagatgggaaaaacgaatgcaaaaggggatcagacactgggagcagctgcggaagaagcagtcgcaggaaatattgtagagtctccgctagtaggaacattttattcagcacctgcagaagatgcagaaagcttcgtaaaagtcggagacagagtagaaaaaggccagacactcggaatcgtggaagccatgaagctgatgaatgagatcgaaagcgattacagcggaacggttgcagagattctggtaaataatcaggaaggcgtggaatacggacagccgttatttcgcatcgtgtaggaggacaatatgaatcatttgaacatcaatcagatcaaagaaatcattccgcaccgtcatccatttcttctgttggattacatcgaagattatgtgccgggagaatatgcagtgggatataaatgcgtatcttacagagaagaattctttgcgggacacttcccggaagaacctgtaatgccgggcgtgctgacgatcgaagcactggcacaggccggtgcggttgcaatcttaagcctggaagaaaataaaggaaagattgcatatttcggcggtatcaataaatgcaaattcaaaggaaagatcgtcccgggagacaaggtacgtctggagacgaagattatccgcagaaaaggacctgtcggtgtcggcgaggcagttgcgagcgtggatggaaaagtagtcgtaagtgcagagcttacattcatggtcggatagataagagcaacataggagagtgtaaagaaagatgattaaaaaagtattgatcgcaaacagaggagagatcgcggtgcgtatcatccgcgcctgccgtgagatgggaattgagaccgtagcggtctattccgaggcagacaaagaagcactgcataccaagcttgcagacgaagccatctgcattgggccggctccgtcaaaggacagctatctcagtatggaaaatatcatcagtgcaacgatcataagcggtgcagatgcaatccatccgggatttggattcctgtcagagaatagtaaatttgcagagctgtgcgagcagtgcaatattacattcatcgggccggattcaaaagtcattgcaagtcttggaaataaacaggttgcgagaaatacgatgatggcagcgggagtaccggtcattccgggaagcaaagaacccgtctacgatgcaaagaccggtgcagaacttgcccgagagattggctatccggttatcattaaggcagctttaggaggcgggggcaaaggtatgcgtaccgcctggacaccggaagagttcgagtctgcattccagacggctcagaaagagaccgagatggcatttgccgattcgacgatgtacattgaacattttgtagagaatccaagacacattgagttccagatcctggcggataaatatggcaatgtgatccatctgggagaaagagattgttctattcagcgcaatcatcagaagctgatcgaggaatctccgtctgttgcattatcggatgaactgagaaagaagatgggtgacgctgcggtaaaagctgccaaagcggcaggttatgagaatgccggaaccatcgaattcttattagaaaaatccgggaacttttatttcatggaaatgaataccagaatccaggtggaacatccggtcacagaatgggtgacaggtgtagatcttgtgaaagaacagatccgcattgcatccggacagaaattatcctatacacaggaagatatcagactgaccggtcatgcaatcgagtgcaggatcaatgcagagaatccggagaaaggattccgtccgtccccgggaacgatcacagatatgtatcttccgggaggaaagggtatccgtatcgattctgcgatatacagtggctatacgattccgccgtattatgattccatggtggccaagctaatcgtgtgggcgaagaatcgtcaggaagcgatccgtaagatgcagagtgcacttggagaagtcattatagaaggaatcgatacgaatgttgattatcagtatgggattgtcaatcatccggattatattgagggaaatatagatattgaatttattgaaaggctgtagaggtgactgctgatgaagctggacaacgtatttaaaaagaccagaattgctgtcggaagaaagaattatattacatttaccagacgaccggaagttccggaaggattacttcgcaaatgtaataaatgtgggggagcgatcattgcggaggatgtaaagaaagatcattatatctgtccaaagtgcggaggatatttccgcgtgcatgcaagacgcagaatcgagatgatcacagatgaaggttcttttgaagaatgggattcggatcttcagggaggaaatcctctggaatacaaaggatacgaagaaaaactgaagaaattacaggaaaagacagggctttcagaagcagttgtaacaggaaaagcaaagattgacggccgcgaggcggctatcggagtctgtgatggaagattcctgatggccagcatgggagaggcagttggagagaagatagcaagggcggtagaacgggcaacgaaagaaagacttccggtcatcttatttgcctgctccggaggggcccgcatgcaggagggaatcgtctctctgatgcagatggcaaagacatccgcagcactgaagcgccacagtgatgctggacttctttacattagcgtactgaccgatcccacgactggcggagtaaccgcaagctttgcgatgctcggtgatgtgatcctggcagagccaaaagctctgatcgggttcgcaggcccaagagtgatcgagcagaccatcggacagaagcttccggatggtttccagagagcagagtttttactggaacatggatttctggatgccattgtggagcgtcctcagatgaaagagacactttctaagattctggcacttcatgaggcaggagaaggaacaggatttaatagaaaaaaatgtgatgtggaactgacatcaggcagcaagatgaatatgaccgcatggcagagagtagaactttccagacgcaaagaccggccggtaggcagtgattacattgacgcactctttacagattttgtagaattccacggagaccggtatttcgcagatgacaaagctatcatcggtggcgttgcaagattccatggcacgccggtaacagtgattgcacaggcaaagggaagaaatacgaaggaaaatatcgaaagaaactttggtatgccacagccggagggatacagaaaagccttaagacttatgaaacaggcagagaaattctctcgtccggtcatctgtctggttgatacacctggagcattctgtggactcgaagcagaagaacgcggacagggagaagccattgccagaaatatctatgagatgtccggattaagggttccggttgtttcaatcatcattggagaaggcggaagtggcggagcacttgcgatggccacttcagatgaagtatggatgttggaaaattccatctattccatcctctcgccggaaggattcgcaagtatcctctggaaagacagctccaaggccaaagaagcagcagaagtgatgaaattgacggcagagaatctgaaggcacagggaattgtagagcgtgtctttgcagagccggaggaatatatcgttcagaatatggatgttgtggtcatgcagatggatgaggcaatcgaagaatttctgatgaaatataaaagtttgtcagagcaggagttaatagaacatagatatgagcgtttcaggaatatgtaatatggagcagagtaaatcactgctatatatcataagaaaacgatgtattttacaggcaatgtttatggacgaacagattctataatagagtgaggaaaatatatgaaaatacaaccactgaaaataggaacaaagacagcaaaagttccagtcattcaaggtggtatgggagttggtatcagccttggaaatcttgctggagcagttgcaaaggagggcggcatagggatcatctctgccgctcagcctggttttagagaagaagattttataaaagatccattaaaagcgaatttaagagcgataaaatcagagtatgagaaagcaagaaagattgcatcggacggaatcattggattcaatctgatggttgccatggagcactatgaagaatatgtgcatgcggtggtagaagcaggagcagatctgatcgtatcgggagcgggacttccgacggatcttccgaaatatgtgggtgagtccgacatcttactcgcaccgatcgtatcgactgcaaaatcggcaaatgtgatattaaaatattgggacaaaaaataccacagaatcccggatctggttgtgatcgaaggaccgctcgcagggggacatcttggatttcatgaagagcagctggaagcgtatggtatagatgctggggcagaagactatgtaaaatgccgaacttcctacgaaaaagaaatcatagccatcatgcaggtcattcatacattttcggaaaaatatggaaaaaagattcctgttgcgattgggggaggaattcatgacagtgaaagcgcagcgcgtgcattttccctcggagcagatgccatacaggtggcgacaagattcgttacaacagaagaatgcgatgcagatatccgctataaagaagcctacctgaatgcaagaaaagaagacatcgtgatcgtaaaaagtccggtgggaatgccgggacgtgcaatcttgaatccatttatgaaaaaagtaaaagaactggggcgtattgcaccggcgcattgttttcagtgtctgaagcattgtaatccgggaaccacgccgtattgtatcactcaggcactgatcaatgcggcaaaaggaaagatagatgatgcgttacttttctgcggagcgtatgcatatcaggcaactcatctggaaactgtaaaagaagttattgattctctgataccagaaagggtataataaaaaataagagtaaagaatgaagagttaaagtgaaggaaattacagaagatgggaatggatgacgcatataagatgatcaatcagacactggtcagtctgatcaatgaaatatgggaactggaagaaaaggcaatcattacggatgagttcaaagatcttacgaataatgatatgcatgtgatcgaggcagtcggacttggcgacgggaataatatgtcttcgattgccagaaagcttaatattaccgtaggatcccttacgactgccatgaacagtctggtaaacaaaagatatgtagagcgtcatcgcagcgaagaagacagaagagtcgttcttgtcaagctgacagaaaaaggtgtgaaggcttaccaccatcatgaagattatcacagacagatgacacaggccattctggataaactggatgataccgagcttccggtgcttgtgaagacattggatgcgttatccgaattctttaccggttacagtgagaataaggagtcataaagtatatggtaaaaggtgtaatctttgatatggatggaacgatgttcgatacagaacgtctttctaccaaaggatggatttacgcaggtaaaaagctgggcgtggatattccggtagcattgacagattcttttcggggaagaaatccacaggcgatccgaaaaaaatttgcagcatattttggagacagactggattacgatacagcgcgtgcaatgaagcatgagtatttcgacgaagtgacaaaagaatctgttccgcataaagaaggactgcaggatttattagaatatttaaaagaacatgagattccggctgtggttgcgacatccacagaaagaaagcgtgcgagcaggctgatacatatgtccggtatagaacatctgatttcgaatgcgatttacggagatatggtggagcgtgggaagccggagccggacattttcctgaaagcagcagagctgattgggcaggatccaaaggaatgcctggtactggaggacagtgcaccgggacttctggcaggaaaggcagcgggcggatatacgatctatgtgccggacatagcagttgtgtcaaaagaggcaaaagaaggaattacggcagaactggcggacttgcatgaagtggctgcatggatcagaaaagagaataaaaagtaagaaggaaaatgactgtcatgcagcctttggaggctgtgggcagtttttttgcatcgctatgcattcgtaaggaataaaaaatataaagattcaggaggaacagatatgtacgagaaagaagtagaacaattacagaatattattgatgacagtaaaagaatcgtattcttcggaggagcaggggtttctacagagagcaatattccggatttccgaagtgcggacgggttatatcaacaaaagtataaatattcgccggagcagatcgtaagtcatagtttctttgtacggaacccagaagggttttatgaattttataaggagaagatgatgtttctggatgccaaaccgaatgctgcacacttgaaacttgcagaattggaagaggcgggtaaattaacggccgtgattacacagaatattgacggacttcatcaggcggccggaagtaagaatgtactggaactgcacggaagtattcaccggaactattgtatgaaatgccacaaattctatgatgcggcatatgtaaaaaatgcatccggaattccaagatgcacttgtggcggaatgatcaaaccggatgtagtactctatgaggaaggactggattcggatgtgatcagcaggagtatcaaagcgatcagtgaagcagatacgctaatcataggaggcacgtctctggttgtgtatcccgcggcaggatttgttgattatttccgcgggaaacatcttgtggtgatcaataagagtgcaacagccagagaagtaggtgcaaagcttacgatagcggcaccgattggggagatacttggaagggtgcattaaattccaagtgttgccgccttcttgtagttataacaagaagatttttctaatcttttgcccgtcatagtatatggatccagaagttgtcaagcttcagcttctgtcacataaccttttgtaactgcgagtgtacggactggtacattggtcttgagggattctttggcgagtgcggcagaggcagcatatccgatagacgggcaaagtgcagttgcaataccggcacttgcatttaccagatctttgcagtgtttttcattggcagtaattccaagaatacagttgtcggtcagagtttgtgcggcgtgaccaagcgcttcgatggactcgaataaggtatagaagatcaccggctcaaatgcattgagttctaactgtccggcttctgcggccattgtgatcgtgtaatcatgtccgatgatattgaaaattgtatttttataagcacaaacgtatatttattaagcgcagagtgagaaaatgcaattatagaaaaatcagaagaaaaacaaaaaagtaatacggaaaatgaagagaaatacaggaaagggcgtatgaatatggaattagaaccggtgcagaagccggagttttatccgtttatagaaagcattccgaatgtgattgagtgcaattgtgtgacgggcaattattctatgcttatgaaggtggcattcccgagtacgattgagttggatggattcatcggacagctccagcatttcggaaagacacagatacagattgtattctctacaccggttgccgggttctatttagtcagctttttgatagatcaggcggatatcaccgttttgcagtgtagtatgcccgcagcaggtgaagcctaatttgacgagcagatgctgcatgggaatattatcatcgtgtgtatcaattttaatatttgggaactgttcataagcccagttcagacagaaggtagctacgccctttgtaccaggtgccgtggcaactctgtgaacaacggcatagggtctgtcatttaaccaggaaccgtcaattgtctggtaatcagggtcttcttccctgtgaaaatagaatacgcctccgatttgctcatcttcttctatctgaatgatgcagacatataagcagtcggactggatatcctgtgtggtaagtgaaaccggaggataactgtcccgccactggtccggattgccgtgttctttcatatatttccgggcataagcatagattgcaaggatgtccggaaggtcattcattgtcgcttttctgatctgcataaaaatctccttttgttattcattactttgtttattttcgtaactgtgggaatatctcaatactgcgttcgagtatccctttcatataagcaatcgcagttccgtaattggtgattggtacagaggcgtcaccggcgcatttcaggcggtatttcatttcgcgctcattcagcatacagccaccgcagtgaatgatcattttataatggttcagcttcagtggaaattcagttccactggtaaattcaaaatctatatcttttcccgtatattcacgaacccagcgtggcagcttgacagtaccgatatcgtcacactggcggtggtgtgtacagccttcgctgatcaggatcgtatctccgtcttccagcgtgtccagtgctcttgcgccgtggacgacggtttccagattccccttatatcttgcaaaaagaatggagaaagaggtaagcgggatatcggaaggagtatctttgtcaacttctttaaatgcctgactgtcggtaatcaccagtgcaggctttttcccgagtgaatccagcgtacttttaagttctgtttcctttacaacgattgcagtagttccggcatccagaagatcgcggatcgtctgctgctgtgggagaatcagccttccctttggcgcggcagaatcgatcggaacaacaagtacaatgaaatctccgggggttacaagatcccggacgatgaatctggaagattcttccgcagggactaaagttccgagacgttctttcaactcatgaatatgaagattttcagttgtattggtccacaggatatgctctaaaggaatcttatatttcagatgagtggacacgatcatttcctgatgtgtatgttccgataccagatcggctttattaaggacgagtaagaggggaatatttttatcctgtatgcgtgtaaggatcgcattgtcctgcggcgtaattcctgaggtgccatcgatcacgagcacagcgatgtcggtcttgttcaggacctgataagctttctgaatgcggagttttccaagttcgccttcatcgtcgagccccggagtgtcgatcatgacgatagggcccagtggaagcagttccatggatttgaatacaggatcggtcgttgttccgcgcacatcggagacaatcgcaagattctgcccggtgagagcattaataagacttgattttccggcattgcgtctgccgaagatcccgatatgtatacgttctgaagaaggtgtgctgtttaaactcatgatatgttcctcactttctgacagctgtatataaaagctgactgtataaaaagttgatgttacctaaatattcaaagaatcgccacggtctgttacaacctgatagcctatggatttcatccgcatttccagacagtgtctgcactgggcggattcatcaccggtacagatcttattatcatatagaagataatctttccgtacttccgttggtgaaaggttcggcattacgacattggcgcctgccaggattccaagttcacgcccctttgggtggatggttccaagtgcggttgtggcaggaagtaaaaccttcgggatcatcagccggatcaggccgagcatatataaagtaagttccagtgttcccgcagattctccggcaaacggagtgtcatgatgtgggataaacggaccgattccgatcatgtgtggattcagttctttcatgaagagcatgtcttctgcaaggtgttccgaagtctggtaaggagagccaaccatgaatccgcagccaatctgataaccgatgtcctttaaatcccgcagacattgctgcctgtgttcaggactaaggttcggtggatgaagctttctgtaatgttcgtggttataagtttcatgccgtagaagatagcggtcggcgccggcatcatagtaagcctgatagctatctttggatttttccccgatggaaagtgtaatggcacagtcgggatagcgttctttaattatccggatcaaatggatgatgcgttcatctgtataatatccgtcttcgccgccctgcaggacaaaggtgcggaatccaagctcataaccttccttacagcactttaggatatcggcttctgacaggcggtaccggtgtgtgttgccgttgcttttccgtataccgcagtacagacagtcgtttttacaataattggtaaattcgatcagaccgcggacgtagacatcgtgtccataataacggtggcgttcttcacgggccatggaaaagagatattcggaaagttccggagtgcgtccctcgatcagtgtgatccattcttctttggtcagggtctgttctttatgcaattgatcgatcagatattttaaagataagttcgtttcattcatgaaaatcattcctttgcccgtatgttattgatcataatatctcacattattataacaaacaattacttgccgaacaatgtaaagaaagaagtgatatgcagaaatagaaaaataagataaatatattaaaaaatataaattgacaattcatgcagatgcgtttttaatagaagtatacagattagttacggcgaattaatgaatcataaagaaaggaagaaatcatgggaattggtaaaagaatattaagtgtactgatcggtatcctcttcattataagtgtgtcggtacttggaggaagtctgcttgcaaagcaggtacttgtcaaagcaatcagtcaggcagggattgatacggcaatctctcacagaatgatggatgcagtatttggctatgcaggagcagatgatacacagtggattgcgaagatacagaacaagattgagaagaacgaggaagtacagaaaattacagaaaaggtcatggatgaaatggtgaatgatctttcaaaaggaacgggctataaggatgtagatatttccaaagaactgaatcagttactggaagacagcatgaaagaaattaaggattcaaatccagagttaacggaagatatgctgaaacttatgaagcagcagttaaaagatgagatggatgacgttcaggatgtactgaatagttatgcatctaatctgtatgataatatgaaagataccagtacgatacaggggaaagttgccagattatatacgacgctggtatcaacgacctgccgggccgtatcgggagcagcagttctgctctgtgcaatcctgacggtattgcttgggtatccaagacacagaggattattttcactcggagtggaaagtttgatttgtggaggaatttttgccggacttataggagttatgggaagccggactatgggcttcttatcggacaagatgctggggcgtacggtagatatagggttaaagtcatatttctggatgggctgtatatttgccggggcgggtgtgatattcctgcttgctggatttataataaagtggaaagaccaaaaaaggatagatgtaaatgagtaacagatttttataatgaagtattcggaacatttgatacagaagatatagaaatgtaacagagtgaatgaacaggatgtaaatgtaacaggtatgagaaaggttatattttacatcctgtatcttttagagcagtaatcggattgattataggtgttttacattacatacggatagcatactggaaatattatatggggcatgctatcatagaaataatgtcttttttcgtagatgtatggaatacaatagaaaacagaggagttaattcagacatggaaacacaacacattatccacaattttgagccaatctataatgaacattctaagattctgatgctcggaactatgccatcgccgaaatccagagaagtcggattctactatggacacccaagaaacagattctggaaagttgtatccgatgtctgtagcgaagcgtatccggagacgagagaaggcaagatcgcatttgcattaagaaatggtattgcagtctgggatgtgctggcggggtgtgatattaaaggagcagatgacagcagtatccgtaatccacagccgaatgatctgagccggatccttgaatgtgcagatattaaggccatttttacgacaggaacgaaagcatttcaactatataagaaattttgctatcctaagactgggattatggcaattggattgccgtctacgagtccggcgaactgcagaacatcgtatgagcagttgttcgaggcatattctgaaattaagaaatatatataacaacgatgaaaataaataagatttctaaataagtaagaatcaagaaagaaggcgtattagaccatatgaaccgggaagaacgagtaagaatactgatcgactatctgaaaaaagaaaatacaggttatgcatcacttgcagatccggtagattataccgggagaagaagacttctaagaagtcttatgaatgtccgctggccgggcgaggcagatccggagtataccaggatccaggatgaactgctaaaggaagaagcagaacagaaaggaatcgtagaatggggacaacttccgactatcggtggacaattcccatgtgagacgatcaagaatgtggataagatatctctctggcggggagatattacaagactttccgtagatgcgatcgtaaatgcggcgaacagccagatgcttggatgttttgtgccgtgtcatggatgcatcgacaatgcgatccattcggcagcaggtatccagcttcgtaatgaatgtgcacagattatggaagcacaaggacatgaagaaccgaccggaaaagcgaagattacaaaaggatataatctcccggcgaaacatgtcatccataccgtaggtccgattgttggcatgcaggtgacagaaaagcaggaagaagaattaaagtcgtgttatctgaattgtatgaaactggcggaaaaagaaggacttaagtcgattgcattttgctgtatctcaacgggagaattccatttcccgaataaactggcggcagagattgcggtgaagacggtggacaagtatctgtcttcttcaaaactggaaagagtgattttcaacgtatttaaagaagaggactataatatatataagaagatatttgcataagagtagaggaacaagagaggaaataaagaaatggacaatctggtattcagtttaaatgcaacagtccccattttcttaatgatgatactgggactgttcttcaataagattgggtggatggatgaggaatttgctaataagatgaacaaattcgtgttccgtgttccgcttccggtattattatttggcgatctggcagttgtagacattaaagaggcgtgggatacgaaatttgtaatcttctgttttattattacattgatcagtatcacgatcgcaatcggaatctcctgcctgttgaaagacagaagtattcagggagaatttatccagggagcgtacagaagtagtgcggcacttctggggatcgcatttatccagaatatctatggtaattccggtcaggcaccgcttatgatcattggaagtgtgccgctttataatattatggcggtggttgtactgtcatttttcaagccgggacaaaaaggcatggataaagcactgatcaagaagacactgatcggtatcattacgaatccaatcatcatcggtattgtggcaggtctgttatggtcggcactgaaacttccgatgccggtgatcttacataaggccgtcagcagtattggcggcgtagcaacaccgatgggactgatggcgatgggagctacatttgacattaagaaagcatttggcaagattaaaccgaccatgattgctgcgtttatcaaattagtgggatttgtagcagtgttcatgccgcttgcagtggcaatcgggtttcggagagagaaactgatcgcaatcttagtcatgctcggatcggcaacaacagtcagcagttatgttatggctaagaatatgggacatgaaggagttgtgtcttcgagtgtagttatgctgacgactatgtgcagcgcatttaccctgacgggatggctctatatcatgaagtgttttggattggtgtaacccttaagagtttctgaaaaatccctaaaatccttgacaaatggggattcgatggctatcatattcagtagtttatacgtaaaggcattgatgaagaggagtacacgtaagttcgtccataccagagagagtgatccatcggctgagagacacttaaggaatacgagacgtcggaaggtagcttcggagccggatgaatgaacctgtaacttatgataaagtagaattagttcatcccggagtcgttcccgttaaagaataagatgagatatatagcgaaggatttcttcctatataatgaaggtggtaccgcgactacaatcgccctttacgtcgatgtaaagggttttttcatttaataaaaaaatgtgaaaaatgtgtgaaatgaggaggaaactatgagcgaaaacctggaaaagacttacaatcccaaagcgattgaagcaaaattatatgaaaaatggtgtgataacaaatatttccacgccgaagtagacagaagcaagaaaccatttactacagtaatgccgccaccgaacattacaggtaagcttcacatgggacatgccctggataatacactgcaggacatcctgatccgttataagagaatgcagggatacaatgcactctggattccgggaacagaccatgcggctatctctactgaggttaaggttacaaatcagttaaaagaagaaggaattgacaagaaagaattaggaagagagaaattcctggaaagaacatggcagtggaaagaagaatacgccggaactatcgaaggacagttaaagaaattaggtgtatcctgtgactgggacagagaacgtttcacaatggacgaaggatgttccaaagccgtagaagaagtattcatcaaattatacaacgaaggatatatttacaaaggatctagaatcatcaactggtgtccggtatgtaagacttctctttccgatgcagaagttgaacatgaggaacaggacggattcttctggcacatcaaatatccaatcgttggaacagatgattatctggagatcgcaaccacacgtccggagacattacttggagatactgcaatcgcagttcacccggatgatgaaagatacaaagacatcgtaggaaaaatgtgtaaactgcctctgacagacagagagattccgatcgttgccgactactatgtagacaaagaattcggaacaggtgcggttaagatcacaccggcacatgaccctaacgactttgaagtcggaaaacgtcacaacctgccggagatcaacatcatgaacgatgatgcaacgatcaatgagcagtatggtggaaaatatgccggaatggaccgctacgaagcaagaaaagcaatggtagctgacctggaagagcagggatacctggtaaaagttgttccacattctcataacgtaggaacacatgaccgctgccatacaactgtagagccaatgatcaagcagcagtggtttgttaagatggaagaactggcaaaaccagccatcgaagcaatcaagaacggcgatttaagattcgtaccggaacgtttcaacaagatctacctgcactggcttgagaatatccgtgactggtgtatttcccgtcagatctggtggggacacagaatcccggcttactactgtgatgagtgtggtgaagttgttgtcggacacggcgcaccggagaaatgcccgaaatgtggatgcgcacactttacacaggatgaagatacactggatacatggttcagttctgcgctgtggccattctcaacacttggatggccggatcagacagaagatctggattacttctatccgacagatgtgctggtaacaggctatgacatcatcttcttctgggtaatccgtatggtattctcaggatacgcgcataccggaaaggcaccgttccacaccgtatttatccacggtctggtccgtgactctcagggacgtaagatgagtaaatctcttggaaatggtatcgatccactggagatcatcgatcagtatggtgcagatgcacttcgtatgacactgatgacaggtaatgcacctggtaacgatatgcgtttctataacgaacgcgtagaggcaagccgtaactttgccaataaagtatggaatgcttccagatttatcatgatgaacctggatgaaaaagaattgaagaaaccggcgaactttgaaaaacgtcctgcagactgctggatcatgtcaaaatgcaacagccttgtaaaagatgttacagaaaatatggataagttcgaacttggtatcgcactttccaagatttacgactttatgtgggatgagttctgtgactggtacattgagatggcaaaatatccgatctatcatgcagatgaagatccggaagcagccaatgcggcactgtggacattaagagaagtcctgaagaaatcactgaaactgctgcatccatatatgccgttcgttacagaagaaatctacagcaagttagtaccggaagaagaatcactgatgatgtctgactggccggtatatgaagaagagtggaacttcccagtagatgagaacattgtagaccactacaaagagatcatccgcggaatccgtaacgtacgtgccgagatgaacgttccaaattcaagaaaagctacagcattcgttgtatgtgaggatgaagaactgggagcaggacttgcacttcttggacatgctgcacagaacatggcagctctgaacgaactggtaatccagaaagacaagagcggtattgcagacgatgcagtatctatcgtagttccggatgcaaccgtataccttccactggaagagctgatcgactttgaacaggagatcgagcgtctgacaaaagaagaggtaagacttaccaaagaaatcgcacgttctaacggtatgttaaataacgagaaattcgtaagtaaagcacctgctgcaaaggttcaggaagaaagagacaaactggagacctaccagcagatgatggcacaggtaaaagaaagactggaaggattaaaagcaaaacagtcataaacaatacatttccgcagttatcggtaacaggataactgcggattagatatcaaaggggattatatgaaaaaacttcagttaaaaaaaccggatatcaagggtaaaatccgcaaaataaaaaatttgaagaaagaggatgtcattgcatactggaaaggcagacatgaacgacgtgagagaatactggaagcaagacgcaacagtgcatttgcaaagaagatgcagccggtctatgcattcatgaatagattctctttgatatttcatgcgttgcttgcatgcatcattaactttgtaatagaagcaatttccagacactccgttgttgcagcctgggactatatgacaggaacaccgctggtattcttatacaatgcatttatgatctttgtgacattttcgattgtatatctgttcaaacgaagaatatttgtccgtatgatcatcggtgcgatctgggtgattcttggaatcgcgaatggttatatcctgttaaagagagttacaccgttcaatgcacaggatcttaagatcgcaggggatggaattgcgctgattaataattactgtaatggatttgaagtggttgtgatcgctgtcggagcggtagcacttctgatctggctgatatctatgtggagacgcggtgggcagtatgcaggtaagatacatcatattgcagcactgatcggaattattgtatgtggcgttctttacacttttgtaacgaatatagcaatagataaacgagtggtatctacttattttggaaatattgcatttgcttatgaggattatggtcttccatactgcttctcggcaagtctttttaacacgggaatcagtgagccaaatggatatacgaagaaagcaatggcaaagattgacaaggacggagaattaaatcagacggctacgagccgttcttctgatgaacttccgaatatcattgttgtgcagctggagtcatattttgacgttgcaaacgcagagtttttcaccacatctgaagatgcatgcccgaatctgcacaatttatatcagaattattcaaacggatattttaaagtaccgtctgtaggagcaggtacggcaaatacagagtttgaagtgctgacaggtatgaaccttcgttatttcggacctggagaatatccgtataagacttattcaaaaaaacatccgacggagagtgcggcgacagcgcttgcctctcttggatacggaacacatgcattacatgataacacaggaaatttctacagccgtgccaatgtatttaataacatgggatttgatacatttaccagtaaggagtttatgaatgtcctgcagacgacagagaatggatgggcaaaagatgagattctgacacatcatattatggaagccatggatacaacaaaacaggaagattttgtatttactgtcagtgtacagggacatggaaactatccggagacacaggtgatcgagaatccgaagatcaaggttgaaggaatcgaagacgaagcgctgaaaaataaatgggaatattatgttaaccaggtctatgagatggatcagtttgtaggtgatctgatcaaggcagtggaagaaagaaatgaaccatctgttgtcgtattctacggagatcatcttccgactatgggactgaaggcagaagacttaaagagccgttacttatataatacgaactatgtaatctgggataatatcggacttcagaaggatgataagaatatcccggcatatcagctgatgtcagaggtactgaacagactggatatccattccggtaccgtattcaattatcatcagcagagaaagggaacaaagaattacctttcagatctggaactcctgcagtatgatatcctgtatggaaagcagtatgtatataacggaaaagcaccaatcaccgaaggccatatggtgatgggaattcgtaatgtgtcactgagcagtattgttccgcagttgaacagtggatatagtctgtacggtgagaacttcacaaaatacagccgcgtatatgtcaatggtgaaaagcagaagagcagcttcctgaataatacgcgtattaatctgtcggagacagaattaaaagacggtgatgtgattcaggttggacaggttggttccagtgatacgatattccggatgtcggataagtacacatatcagaacggacagcttgtaaaacaggaaggcacagcaaccgataagagcaaatcttgggtggatcaggattatgatgttaactaaaaaagaaccggaaacgttcacatatgaagaggcagcagcgtatatcgaagaaattccgaaatttacaaagaaacatacgctggagcacacaaaaacgtttttaaaaagattgggtaatccggcggcggacagaaaaattgtccacgtcgccggtacaaatggaaaagggtctgtatgtgcatacttacaggccatacttatggcagaggggaagagaacagggttctttacatcccctcatcttgtatctgtaaatgagcggatacgggtagataatatacagattgataatgagacatttctgaaggtgtttcgaaaagttttaaagatagtacgtcagatggtggaagacgggatcgaacatccttcgtatttcgaatttctatttggaatgggtatgacagcatttgcagagacagatgtagaatatatcattctggagacgggacttggcggacggctggatgcgacaaacgcaatagacaatccgacacttgccatcataacatcaatcagtctggatcatacggcgatcctcggtgatacgatcgagaagattgcgggtgagaaagccggaattattaagccgggtgttccggtgttctttgacggaagcagtaaaaaagcagcggaagtcattaaggcaaaagcttcggaactgggcgtatcttgtagagaagttacgaaaaatgcgtatgaaattcaggaagttcaccgcaaatatattgcattttccagacggagtgcgtatgataaagatgttatctttcaggtaccgatgtgcggatgttaccaggcgatgaatgcagagcttgcactggaggcgtcggaatatctgcttgcgggagaagagatacatatggaccggtggaaggaagcacttgcagaacttcactgggaaggaagaatggaacgggtaggagcacatattaccgtagacggtgcacataacccgggcgcaatggaagcgtttgtagaaagcgtaaaagcactggatgagtccgaacgcggagaaatggtattactattttcagcagtatcggataaaaagtacgatcagatgatagaatatctgtgtgagaatctggatgtgaaagcttatgttgtcacacagatcgaggacgaaagaggtgttccggcagaggaacttgctgatgtcttccgaagatacacagacagaccggtgtactgtaaagaacgattagaagatgccgtgagaacagcaatgaatgaacggggagagacgggagagatatactgtcttggctctttgtacctcgtaggaatgatgaagaagttactggcaggaggtgccatagatgcttgattttgaagaagaattaaagaagttccagccaagtctggaagtagaggaactgggagatgcgatttaccaggatgatctgacagacatgacagatcttttaagagaagtaatcgaacagacaaagcaggatgatccacagtaaactgcggtagagagaatatagagggaagtatatggattacacaacaaaactggcgtatcagtcgaattactggtataatgacggacttaacaaagcgaatatccgggatctgaccggtgccattacatcgcttaagaagagtttacaatataacagagataatattgcgtcaagaaatcttctgggacttgtttattatggacgaggcgatgtggtagaagcgctggcagaatgggtcttaagcaagaatcttcagcctaaggagaatattgcgaattattatatccagaaagtaaaagaaaaaagagatgatctggacagaatcaatcaggctataaaaagatataatcaggctttggattactgttatcagagatgtgaagatctggcagttatgcagcttaagaaagcaatcgagatgcatccgacgtatgtgaaagcataccagcttctggcgctcctttacattatggaagaacagtatgcagaagcgagaaagaatatccggatcgctcacaaactggataagaccgacgatatcacgatgcgttacatgcatgagttgaatcaggtacggaagtcaagaaacatccgcctgatagacgataaagataccggaaagaagaaaaagggcagacagacagttacttataatatcggaaatgagacgatcattcaaccggttgcttcaggattaaaagataatgtcggcctgcatacaatggttaatattgcaatcggtgttattgtaggtgtggcagttatgggattcttaatcatgccggctgtgtctgcatcaagacagagtaagctgaataagcagaccgttaagttcagtgatcagatcgcaactcagaaatcacagatcagtgcactgaaaaaagagctggataattaccggagcagcagtaaagaagcagagaatcagcagcagacagcagagatcacaaagacaagctatgaatcactgatgaccgttatatctcattattcaaccggagatatgagtaattcggcactggcagaggaacttctgaagattaattcagagacacttggagcatcgggaaaagaagagtatgatacactgacaggaaagatatatccaagagtctgtgagagtctgtatgtaacatcacagaagaattatcaggtggcaaattatgatacggcagtgacgaatctggagcaagtcgtacagatggacgaaggatatcaggatggtgcggctatgcttcttcttgcacagtcctatgaaaaacagggtaagcaggataaggcgaatacgtattatcagaagatcatcgaaaaatataacgggacagaggcagcaacagaggcacagaatgctcttgatgtacaaaatgccaaaaagaccaaagacaataataattagaaaatgtacgaaagaaaaggatatacacggtaaagtgtatgtccttttcttttatacttaagtatgtaaggggagtatgtaacatgaaatatcaggtacaggaaaattgtcttactatatttttaccgggggagctggatcatcataatgcagaagaaatacgaaaagaatcagatcatctgattgaacacaatcacatacgttatgtgatctttgactttgcggatacaaaattctgtgacagttccggaatcggagtgatcatgggtcgttacagaaagatctatatgctgggcggtgaagtgtgtgcggtacatacaagcgagaggatcaggaagattcttatgatgtcaggagtaacaaagattatgcagatttatgaggaggagaaataaatggaaaataccaatgaaatgacgattatttttgacagttattcatccaatgaagcatttgcaagagtggcggttgctgcatttatgacatcgctgaatccgacagtggaggaagtagcagatgtaaagactgcggtatcagaggctgtaaccaatgcgatcatccacggatacgaaagtcggatagagaagatcacgcttcgttgtaagacatgcggggatactttgtatatcgagatagaagatcatggaaaaggaatggaagatgtaaagaaggcgatggaaccgttatttactacaagaccggagcttgaccggtctgggatgggattttcttttatggaagctttcatggatcaggtagaagtaagttcaaagccgggaaaaggaactattgtgaaaatgcagaaaacaattggaaaaggacgaaaggtatggaccacacaatcgctttaattcagaaatctcacgaaggggatgaagaagcaagagctcagattgtggaggaaaatacaggactggtctggtgtattgtaagaagatttacgggaaggggaacagagctggaagatctgtttcagatcggaacgattggattactgaaagcaatcgacaagtttgatctgagttatgaagtgaaattctcaacttatgctgttccgatgatcagtggagaaatcaagcgcttcttaagagatgatgggatgataaaggtaagccggtcgttaaaagaactgtcttataaaggatatcaggcccaggaagtactcggaagaaagcttggaagggagccgtcggtcacagaacttgcagagtatcttgatgtgtcaccggaagaacttacgatggcgatggatgcatgtacggatgtggaatcactacaccggccggtatacaaaaaagaaggacaggagatttcactgatggaaaaagtaggaaaggaggacggtgcggaagaaagagtactggatcatctgctgttaaaagagcttctgacaagtctggataaagaagaaagaaaactgatctatctgcgatattttgccgaaaagacacagactcaggtaggaaaggaaatgggaatttcccaggttcaggtttccagaatggaaaagaaaatattaaaaaatctaagagaacgtatctgacaggcacatcatgaatatattctggaaaatcagccatactaactcatgaaacttggatggaaagggtgagtaagatggaggatgccagaagaaagatcaggatgtgcctgatctttgttgtgacattggcagtgatcatcgggctgatttattacttccatgatgtaagaggcaatcacggagtcaatgaaggaacactgataaaaagaatggaaataactgcaaaaaatgatgagataaacaggaggtgaagaagatgactgcgaattctgatgatatatatataaaagcagaccggaatatagaggtcgcaaaaaagtcggtaacgcttggagatgtattgaagattgaatgcgtcaatcctgcaatgctggccagaatcagaagtacgcatcttctgacatttcatcacccggataataaaagggaaagacgagtggtcatgtcggtcttaaaagtgatacagaagatccatgaaatctatccggaggcttctgtggaaaatatcggggagacggatttcatcgtgacatatgaagaacaggatgggaaaggcggagttattcacgtggcgaagattgtcatggtggtgctgatcagttttttcggagcggcattttcaacaatggcattcaataatgatgtaggcgtgacaaaaatgttcggacagatatacgaacttctgaccggaacaaagtcgaatggatttacgattctggaatttatgtattgtattggtattatcatcggaattctgacattctttaatcatttcggtaaaaaacggctgtcggtagatccgacaccaatggaggtagagatgcgactgtatgaaaatgatatacagacgacgcttgtggaaacgtactccagaaaggagaaagaattggatgtggatgaaaaacatattcctggcaattctgggacttagtgccggaattacggcggccggaggtttattttcttttattatcggactgggagtggtgtcggattttgcggacaggacacatacaggtgagcatgttatgctctatgaagatgccattgcagtgggcggcagtatcggagcaatcatctctgtctatcatcccacgataccatacggaagctggctggttccgctggcgggacttttcggtggaatctttgtaggatgctgggcgatggctcttactgagatgctggatctcttcccgatcttcatcaggagaatccggcttgtgagagggattggagcgatcattataggaatcgcttttggaaaaggattaggagcattactgtttttttggaaaaggtggtaaaaaatggataaaaaaagacagcagcaggcttatgaaaattatgtaaagcaaaaaacaccggtgcataatctgcctgctaatatgacaaaagcattcgtaacgggaggcgcaatctgcgtgctgggacaagggattttgaatatctgtgagaaggcaggattagataaagatataagtggcggctggtgttctatgcttctggtatttctgagtgcagtactgacgggattcaatgtctatccaaggattgcaaaatggggcggagccggagcactggttccgatcaccggatttgccaattcggtggcagcaccggcaatcgaatacaaaaaagaaggacaggttatgggaatcggctgtaagatatttacgattgcaggtccggtgattctgtatggaatctttacaagctgggttctgggactgttctactggctgttaagaattgtcggagtattatgacggcagaggatctcagatatgtaaatatgtcgggaaaggataagatgaatgataaagggaaagcaaagtatagcctttgaggtatctccgtaccttgaagagagtgcttcggttgttgggaaaaaagaaggagaaggacctttgggcggtatgttcgatatggtggcagaggaagatcttttcggggagaatacctgggaagaagcagaaagcaccatgcagaaggaagcatgtcttctggctcttggtaaagcacatttggcaccggagagtatccgttatctgttcggtggagatctgttaaggcagggagtggcaacttcaatgggagtagagacacttcagatcccgatgttcggattatatggagcatgttcgacttccggagaagcacttgccctggcttcgatgagtgtagctgcgggatatggagaacggatgctggcggtaacatccagtcatttcggaagtgctgagaaagaattccgttttcctctcggatatgcgaatcagagaccattatcggcgcactggacagtgaccggaagcggagcatttatcgtggggaaaaatagaagtcatgtgaggataaccggggtgacagtaggaaaaattgtggattacggtctgaaagactcacagaatatgggagcatgtatggctccggccgcatgtgatacgatcattcagaatctggaggattttgaaagaaaagaaacagattacgacaggatcattaccggagatcttggctatgtggggcagagtattttattcgaccttatgaggggaaaagaacatgatatcaagataaatcatatggattgcggaatgacaatctttgatcagaatctgcaggatacacatgccggaggaagtggctgtggttgtgcggccgcaacattatccgcttatatcctgccaaagatatcaagaggagagtggaaacgtgtactctttgtaccgacgggagcgcttatgtcaaccgtcagttataatgaaggagccagtgtaccggggatcgcacatggaattgtcttagaacattgctaggaggaaaagattatggattatatcaatgcattctgggtagggggactgatctgtgctctgacgcagatactgctggacaggacgaagctgatgcccggaagaatcatggtgcttctggtctgcagcggttctgtactgggagcatttaagatatatccggttattcaggattttgccggagcaggagccagtgtaccgttactggggtttggaaatcttctgtggaaaggtgtaaaagaagccgtagaaaaagaaggatttatcggaatctttatgggaggatttaaagccagtgcagtaggtatatcagcggctctcatctttggctatctggcgtccctgatctttgagccaaagatgaagaaatagctgtgaacacggattaagagatcattaagattcgttcataccggaaagtactgccatcggctgtttgaagaaatgattaaatgcggcgatagcacgtccgaccccgatcacggcaaggaccgttccgattccgatgcctaccaggtgatgcgcaaagataagaccaacagagattgtcagacagatattaaaaaggtcgaaacaatttttggtaaatcctacgcttttgtggatgaaatcggagattgcctgaacaattccatctccgggatttgggatgatacgcatgttcaaagacatggcggcaccgacgcctgtcagaatgatggcaatgatcagaaagaggatccttccgggaaaacttccggcaaaagaatccggataagttgtccaaagatcagggatcataccggaaaatatattcaggaaccgggtgaaaatcaggcttagcgggaattgtaaaatgtccataaaaaggaccagtttcaggttcatgtgattagcgtgttccagaggaagaccttccgattgtctggcatggagacttcggatcgtatgtaggatcatctctacgacaacaaaaagagcataaagaaccagtgtagtatttccaaaattaaagtgccagatcgtagagatactgaatgacactgagatgataggagatacaccgaggccggtttttgtgttcagcgtgattcccagagcgagaataagaagtcccatgagatagaaaagtccacggtaaaaatatgttttttgcatatataaagccacttctttctatagaattttgtataaaaatgtaaaaactgtcatcggcagatcctgtagatatccaaatatacaagagacgttgtcgatggcaagttctgtaaatataataaaactcccgtcagaaactgtcaatgagacagttgccgacgggagtatgtatcgctacctaatcagatatctgagagaaccgcaaggagtttgattctctggatacaggaaaattaagcaagttcttcacctgtgatcatcttgtagcactgaagatatttgtcaattgttttctggacaatatcatccggaaggttccagtcattatccgggtgagaagtcagccagtcacgtgcaaactgtttgtcgaacgacggctgtccgtgtcccggttcataaccttctacaggccagaaacgagagctgtccggtgtcagcatctcatcaccgataaccatattaccattttcatcaagaccaaattcgaatttggtatctgcgataatgataccacggcttaatgcatagtctgcacattttttatagagagcgatcgtacagtcacgaagcttggctgcatattcttcgcctttaccagggaaatatttctcaaggtgggcaatgctctgctcgtaagaaatattttcatcatgatctccgatctcagcttttgtagatggtgtatagattggctctggaagcttatccgattcttttaatccttccggaagcttgatgccgcatacagtaccattttcctgataactcttccatccgcttcctgtgatgtaaccacgtacgatacattcgattggaagcatctcaagctttttgcacatcatgctgttaccgtcatattctggtttctggaagaattcaggcatatctttcacatcagtagagatcatgtggtttggaagaatgtcttttgtcaggtcgaaccagaatttagacatctgcgtcagaacagttcctttcttggaaacaatattcttaagaattacgtcaaaacaactgatacgatcagtggcaaccataatcaggctgtctccgttatcataaatttcacggactttaccttcttttattggtttcataacaatacctcgcttatttattattttttttaatatgtcctcactaatagtcaaacagatttttcaggaaaaaacaatagtaaattgcaaaattatgaaaaaaagtacaaaatataaattatgatgtataataagaatatcgtaaaaaagaatactgataagtaatggtaatagtgactgataacgacagataataaggaaagaaattatgaaacatattacaattggaatcctggctcacgtagatgccgggaaaacaacattatcggaatgtatgctttacttaagtgggcagatcagaaaacttggacgggtagatcataaagatgcatttttagatacatacgagctggaacgggaaagaggaatcacgatcttttccaagcaggcagaattaaagatgggaaatctggggataacgctcctggatacaccggggcatgtggatttctctgcagaaatggaacgtaccttacaggtactggattatgcgatcctggtgatcaatggtgccgatggtgtgcagggacacacgcgtacgctttggagactgctcaaaagatatcagataccgacgttcatattcatcaataagatggatcaggtgggaacggataaggcaaaggtactggcagatctgcagaacagactggatgaagggtgtatcgatttttcggagataacggaagaaacgtataacagtcttgccatgtgtgatgagaaagcgatggaagagtatctggagtcggagaaaatagaagaggatacaattgctgagataatcggtaacaggaaagcatatccgtgttattttggttcggcgctgaagatggaaggcgtacaggaattcatggatgggatgactggttatgttgaaaagaatgaacagataaatagcacagatactaatacaagtaattttggcgcgaaagttttcaagatatccagagatccagctggcagccggttgacgtatctgaaagtgacatccggaactttgaaggtaaaagatacattgaccggaatagcaggaaagcagcagagtaagaaggaatccgaccttgcacaagatagatctgagacagttatgaacagctgggaagaaaaggtcaatcagatccgcatttattccggtgaaaaatatgagatggtacaggaagcgaaaagcggcatggtatgtgcagtaaccggattgaattatacttatccaggtgaaggccttggcatagaatgcgattccgaagcaccggcactggagcctgtcttaagctacaagatcgaactcccggaggggtgtgacgtccacaaaatgctcggaaatttacgtatactcgaagaagaggacccaatgcttaagatcgtatggaatgaagaactgggagagattcatgcaaaacttatgggagcagtccagatcgagatattaaaaagtctgatcaaagacaggtttggtgtagatgtggaattcgatacgggaaatatcgtatataaagagaccatccagaatacagtggaaggtgtggggcatttcgaaccgctccggcattatgcggaagtacatctgaagatggaaccgggagaaagaggcagcggtattgtgatcggaacggattgtagtgaggatatgttagacaagaactggcagcgtctgatccttacccatcttctggaaaaagaacacaggggtgtgctgacaggttctgtgatcacggatatgaagatcacactgacggcaggacgggcacatctgaaacataccgaaggcggggatttccggcaggcaacctaccgtgcggtgcgccaaggactgatgcaggccgaaagtatgctgctggaaccgtattatgattttcagctggaaattccatcgggaatgatcggacgggcacttacagatattcagcggatgaatggggagaccggtacaccgcagacagaaggagagatgacgacgatcgagggatatgcaccggttacaggtatgcgggattatcagatggaagtgaattcttatacaagaggacagggacatctgacctgtacgttccgcggctatgaaccttgccggaacgcagaggcagtgatcgaagagattggttatgatccggagcgcgatatcgagaatccgacaggatccgtcttctgttcccatggtgcaggatttaacgttccatggaatcaagtgccagagtacatgcatttggagaatcagcttgaaaaagaacaggcattagaagaagcaaagaggcagtcagagcaggcagcaagacaggtaccgagagcggccagaacaccgggagtctattctaaagcagcagaaaaagaactggaagaaatctttatccgcacatatggaaaagtagaaagaaaaggtggactgacaccaaaaacttacgaaagtgagtatgcaaaaaaacagcgcaaaaaagaagaggctatgcaggaatacctgctggttgacggatacaatgttatttttgcatggcaagagctgaaagaactggcaaaagtcagcatcgaggctgccagagataaactgatggatatcctgtgtaattatcaggggtataagaaatgtgtcctgattctggtatttgacgcatacaaggtagaaggctatgcactggagatccagaagtatcataatatccatgtcgtatataccaaagaagccgaaactgccgatcagtacattgaaaaggtcgttcatcatatcggaagaaagtatcatgtgacggtcgtgacttccgatggggtagagcaggtaatcacgatggggcagggtggaacccgtatttcttccagagatttcttagaagagattgaatatacaaagaaattgattgaagaagataatgaaaaacaacgggtcagtgacaggaactatctgtttgaccatgcggatgaggaatttgtgaagaaaatggaaaaaatcaggcttggaaaagaaactgaataaggataagtaaaaaataagcatatagaaaaatcttaaagatccgatttttctgtgtgctttgtattgttatccggtaaaagcagggacttgatgaaagtatgcatatatagaaataatatataaatgatgaaaacatatcaataaacacaattagacagatagattatttattggtaaaataatatttaatgatagcatgcaagtcatgaatgaagggggaatatatgaaaaagaaaaatgattggataaaaaagggaatcttgatcatagttttactggtatgcattgctgcatatttatgggtaccggggatacataagacaatgaaccggatatttaagatgtttgcaagcggagactttacagttgtaagagattttgttgcgtcatatggggtatatgcggcactgatgtctttcttgttgatgatttttcagtcaatcgcagcacctcttccggcatttttaattacatttgccaatgccagcctgtttggatggtggaaaggtgcgattctttcatggagcagtgcaatggcgggagcagccatatgcttttatattgcaaaaatattaggacgtgacgtggcggaaaaattaacaagtaaaacaggtcttgaacaaattgatacattttttgaacgttatggaaagaatacgattttaatctgtcgtcttcttccgtttgtatcatttgacattgttagttatgcggcaggtcttacttcgatgtcatttgtttcattctttgttgctacgggaatcggacagttaccggcaaccatcgtctattcttatgtgggcggtatgctgactggcggagcgaaacttcttgtaacagcattattgattttgttttctctttcggcattaatttttatgctgagaaagatatatatggacagacagtccggaaaataaaaaaaagggaggaaaaagaatatggaaacatattacaatccggaggatcttgcaaagtttgggacaatcggggaaaaagcatcagagttggcagaaaaattctttgcttattacaatgcggtattcgaagagggtgcgctgactgcaagagagaaatcattgatcgcacttgcagtggcacataccgtacagtgcccatattgtattgatgcttacacgaacgactgcctggataaaggtgtcagcgaagaacagatgacagaggcggtacatgtagcagcggcgatccgcggcggagcaagtcttgtacacggggtacagatgaaaaatattgtaaagaaactggagttttaattaaaaaagaagaaaagaggaaaaataagatgaaaaagaaaattgtgacattattactggtagctgcaatgacaggaacaatggttgttggatgtggatcaaaggctgatgataagacagcagatacgaagacagaacagacggatgataaaaaggatacagaggaaaagaaagaactggcagatgatgaataccagtatgtatccgcggcagatacagtaattgcagacggagttcacgtgttagatgtaagagaatgggaaaattattccaaaggaagagttgcaaattcagagtggtgcccgatcttcccattggaggacgattccctggtagatgagatgacaacttatgccaaagatcatctgaatgacggaaaagatatctatgttatctgcaacagtggaaaacgtggagctgaaaaagcaacagctgtattaagagatgcaggaattgaaccaacatccatctatacagtagaaggtggagcagaagcacttggtaaagaaaatggggcattgaccacagaccgtacagaagaaaatatcgattggaaatatgtatcaggaaaggatgccgttgacaaggtaggagataaagatgtacaatttttagatgttcgtgatgatgatacctataaagcaggtcatctgaaaggaacacttcagtgcagcctgaaggaatttgatacaccggaagcacagacagagatgtacaatcttgcaaaagacaagatggacaaggatgagcctgtatatattctctgctacagtggtaataaatgtgcaaaaacagcaatttcagtaatgaaagatgcaggatttgatacagataatttgtttatcattgagaatggagcaaaagacggtgatgtatccgcagcttttgtaacagagtaaagctaggtgttcgaaagaatctgttatggtttacaaatgatgatggaacaggctggagagcaaccgtaccatttcttgtactttatgaaaatggatatgataacatttctgtgtatgatggtggatggtatgagtggctaatgcatgatgactatccggtacaggttggtgatccggcaagtgatgagtgtgttcacacaacagttggagaactttctacaggaaaagcagcaaaataaaacaaagcagagagtgtagagaatttctgcgaaaatataatacaaagattaggggcgctgtcactggatatcagtgacagcgtttggtagtattaaggagaaaaatgaaaaaaatcatttatacatttttagatttattaaccatagcgtttttgatcggaggatatgtgttccaatattttacaagaaaaaaactggggatgcttcggtgggtgaattatcagaatatgcagatccagaagaaccctgtttatgatatactaaaatatattacagttgctgctgctattgtacttatcgtattaattattgtgggatataggaagaaaaaagaatgaaaaataaaaaattgtggatatttatcggaatgatcgttctgattttgatattaaatcacatatttggctggtcttcttatctgggaaatacagagaatctgaaattcctggaaaacatggtacaggaaaatttagtgttggcgattggcatctataccatacttaccatcataagctgtgtggtacttgcacttccgggggtgacatttgcaatcgttgcaggtctggtatttggaccggtacttggaaccatctgttgttccgtagcgactacacttggggctatggtagcatttgttgcaggaagatttttcttacaggacattattaagccgatggcgatgaagaacaaatatttaaaaaaatggttatttgatgagtctggaaataatgaagtatttattctaatgatcacaagactggttccattatttccgtataatctgcagaattttgcttatggtgtgacagatattaaattttcaacatattccatttgttctttgatcttcatgcttccgggaacagctatgtatacggttggaatggcaggacttgcagacaaagagaaccgtattttttatatcgggatagcaattgttctggcagggattgtaatagggcttggtgcgtttcttaagaagcactatgtgcaggaggaaaaaaatgaagaataacaatacagtagaagcatgtacccattgtcatgtctgccagaatcagtgtgaatttctaaaaaagtacggaatagatatcggagatacagagaagttaaaagagctttcttatcattgtttcctgtgtggaaagtgcacagaggtatgccctgagaatattgatggaagagagtatattctaaatctccggagagaaaaagtagaaaaatccggtggaactttggaagaaaaaggatatgggatgctgttaaaagaaaaaaaagattatatataccggaattacagacatgcacaaggggaaagtattctgtttccgggatgtaattttccttctttttatccaaagacgaccaagaggctggtaaatgaactgaaaaaatatggcataggagtggcatatgactgctgtggaaagccgattgtagaacttggcatgaaagaggatgaaaaaaggattataggtcagatacaatcagaattgcataaaagaaaaatcaaagaagtaatcatgctttgtccgaactgctatgcatatttaaaaccaagaatggaagaagtaaaggttgtaagcatctatgaaaagcttgaggaattcgaaatcggaaagaagaatctgtttccggcaaaggtgttccttccatgtcctgacagggaaaagaaagaactgttaggagagatagagcgatacatagaaggaaagttgattccaatcgaagaggtacagtgctgtggtttaggtggctgtgcccctgtaaaagagccagaacttgcaaaaaatatgggagcagcgttaaaaaatagtggcgggcagaagatttacagctattgtgcgtcctgtgcaggcaatctaaatcggaacggatctaagaatgtcactcatattttgacagaaatattagaaacagatgaaaaagccgatacagggaaatcgatgatgaatagaatgaaaacaaaatttatataaggggataacgacggaaatgaagagggcagtgatcgtatttaccagagttcccattccgggacagacaaagacaagaatgatgccatatttttcgccggaagaatgtgcaaaacttcatgagaattttctgaaagatattgcacaggaatgcgaaaaagtaaatgctgacatattcgtatgctacacaccgaaaaaagggaaagcatatctggaaaaattattcaggaaagcaaaagaatatattccccagacaggggaaggtctgggagaaaggatgtatcaggcaatcgaatatgtactggaaaaagggtatgattcctgtgtattaataggaacggatataccggaactgaaatgttcggatttggagtatgcgttcaggcttttggatgtaaatgatgtagtctttggtcccaccgtagacgaagggtattatctggtcggaatgaaaagaccggtatgtgaagtgtttgaaaagaagacatatggaacaggaaatgtactggagcagaccgtgcagccattacaggaaatgggactgacaatcggatatgtaagaagattgcaggatatggatgacagagatgatattacggcgtatcggagccggatgaggacgcagaagttacttcagaacacacatactggacgttacctgctaaaaaaacagaagatttctatcattgtgccgatctataatgaagagacaacgatagagaaactgttggagcaattagaaaacttacagggaaagtgtgagattattctagtcgatggtgggagtacagacgcaacattgtcgatgatcagaccgggatttaaagtactgcattcggaaaaaggcagggcgaaccagatgaatcttggcgcaaaagaaagtaccggagatattcttttctttcttcatagtgacagcgaacttccgaaaagaccgctggaagaaatcaaagcagtgataaaagatcatgaagcaggatgctttggcattgcatttcattccagacagttttttatgtggacatgcagagttatttcaaatcataggataaaagacagaaaagtgatgtttggagatcaggggatttttatcacaagagaactgttcttcaaagcggggatgtttccggctcttccgattatggaagattaccagttttcgcttacgttaaaggaaatgggagtaaagcttggcattgctaggcacagaatctatacgtcagaccggagattccctaaaaaggtgattcctcagttaaaagtgatgtggaagatgaaccggctaagaaaaatgtaccgggatggtgtgccgatagagacgatatcgaagttatataaagatgtaagataaaatgtcaggaaacaatatagccaataggggatcgggattatggaacgtataaaaggattaaatgaatatgtgaaaaatgaaaagtataggaaagcattaaatcttccgaatgaacaggaagaagaatatacaatgcttgcacagggagagtataatattaattacagcttcacgcatccaaagacagggaaaaaacttctgttacgtgtcaattgtgggagtcagatgcatctggaaaatcagatcgggtatgaatgtcatgcactgcaattgctggaagcatcgggaagaacgccaaaagtgctttatgtagacgggagcaggaaatttttagatcacggagtactggtaatggaatatctgccgggaaaagcattagactatcatacggatttaaaatatgcggcagagtgtctggctgatatacatagtgtcagaataccggaatcagaatcgggtttgattcggccagagaatccactgatcgcaatattggaagagtgcgaagagatggtgaagatatatatggattcaccgcttggaaaagacaggatgaaaaggaaaatccgagatttgcttgataaggcatggaaaaaggcaaaagaattccatatggaagattcaccgtatcaatgctgtattaatacagaactgaattccacgaatttcttgattggaggagaaggaaagccgaactatctcattgattgggaaaagccgttatttggagatccggcacaggatctgggacatttccttgcaccgacaacgacgttttggaaaacggatgtgatattgaaggaagaagagatagaaaattttctgaatgaatatctgaaatgtgtgagggcgcgttttgatataacgggattaaaagaacgaacgaaagtatttatggagattacatgcttaagaggaatcacctggtgcgcaatggcatgggtgcagtatcagcagccggataaactgatcataaatgaatctacatatcggaagctggaggattatctgagtgatggatttttagaaaaaatagaaatatttttggaacaataatgtaagtgagaataaggagaaaagagatggaaaaagaaaaaattgcggaactttttatgaaagggattgactgttctcaggttgtagcaggggcatttgcagaagaactggggatcacacaggaagaagcatataagatggttgcaggatttggcggtggaatgggaatcggtgaaacctgcggtgcagtagttggtgcaatgatcgtactgggaatgaaatttggacattgtgatacagagcatatggaacagaaagatatcatgaatgccaaaagagcagagttcctgacaaaatttcaggaaaaatatggtgtctgtagctgtaaaggattattaaaacatgatattgcagatccagagggcatgcagaagatactggaagagggacttttgtttgatttctgcccggaaatagtaagagataccattgaaatattgaatgaggttgtgtaatgaatgatatcatcaaagattttcatgagctgacagagattccggtatttcaggagatggtgccggataagaagtatatggatacagaagagcatctggatgtattgcagatgaatatcggacggaaatgtaatctactttgcaaacactgccatgtgaatgccggacctgcaagaacagaagaaatgtcaaaagaagtgatggatgcctgtcttacatttgcaaaggaacagaatattgcaacgatagatattaccggaggtgcaccagagatgaatccacatctggaatatctgatagaagaaagcagtagaatctgtaaccatgtaatcatcagaacgaatctggtcatattattggaggaagaatatgaacagctaatggaagtgtatacaaagaataaagtagaaattgtgtgttctcttccgtattatcgtgcggcagagatggataaggtgcgcggagaaggatcatttgataaggctattgaagtaatcaaacacctgaatgcgataggatatggaagaaatccagaactggtattgaatatggtctataatccggcaggtgctttcttcccacctgatcaggaagcaatggaaaaagaatataagcagaaattgttgcaggattttggcattgaatttaacagcctttatacattgtataataatccaatgggaagattcggtgcatttcttcaaagatcgggaaatttaaagcgttatatgaaaaaattattcgatgcattcaatgcagatacagtgggggcattgatgtgcaggacgcagatttccgtggattatgatggacagttgtatgattgtgattttaatcttgcggcaggaattccggttgttggaaatcagaaaatttttgatgtgacaggaaagccatatcaggttcgtaaaatacggatggataagcattgttatgcatgcacggcgggagccggttccagctgaggcggcgcaacgagttaggcaggctgcctgacaaatacttctggaagaagagcgtgtattatgttacactaatgcagtatgaacaataattatgcatggaaatgtaagaatatacaaaaggagaaaagaatatgccagtttttgattttaatgcaacaccggacgagaagaaaccagcggaatgtacatatacggtaatccgctctaatgaaaatgaagcaactatagaaaaaccaatgatgatcctggataataagcaatgtaaatgggaacatcattcctgcggcgtatttaccaatccgatcaagaggacatcattcgaatttcagcaggaagacggaaccgtaagtgcagacatcttaaagatcgatgcaaggtttgtaagtctgttaaaatggctcggagagaatcatattaatgtgcgtctctcaggagagaatacagaagaaggatatgcagtatacaagatccgcgagattgcatttggcggcggtacaaagttatctgcagaagatggattcctgcaatttatgatcgagcgtcttctggcaagtaatgcaccggcagaagaggagaatgatgaagatgaagacgaagcaggagatgatatgaagcttaccagtcttcagagtatcacagacttcatgaactgtgcgggaagaacccttccggataatatccgcctttgggcaagacgtaatcttgccgtggcacgttctcatgaagtatcaccggaagaaagacgtcatgcacagagagcgctttctattatgatgaatgtacagtggaagagcaattattttgaagcgatcgatccggatgaagcgcgcagaattcttgatgaagaactttacggaatggagcgcgtaaagcagagaatcatcgagaccataatccagatcaaccgtacacatacattgccggcatatggacttctgttagtgggaccggcaggaaccggtaaatcacagattgcctatgcggtagcacgtatcctgaagcttccttggacaacactggatatgagttcgatcaatgatccggaacagttaaccggaagttcccgtatctatgccaatgcaaagacgggtatcatcatggatgcatttgccatggccggagaatcgaatctggtatttatcatcaacgagctggataaagcagcatccggtaaaggcaatggcaatccggccgatgtacttctgacattactggataaccttggatttacagacaactatatcgagtgtatgattccgacggtaggtgtatacccgatcgcgactgctaatgacaagtctcagatcagtgcaccgttgatgtcacgtttcgccgtgatcgatatcccggattatacaccggaagagaagaaagtgatcttctccaaattcgcacttccgaaggtattaaagcgaatgagccttaaggaagatgagtgcatcatgagtgaagaaggtctggacgaagtgatcgaattatattcgaatacatccggaatccgtgatctggagcaggcagctgagcatattgcggcaaatgccctgtatcagatcgaggtagatcatgtgaagtctgttacatttgatgcagaaatggtaagaaatctgttaaaataaatgaaaactacaagaacaacattttttacaagagataaaaaattttataagacattttttcggttgatgctggtcgtagcacttcagaatctggtggcatacagcgtgaacatgttagataatattatgcttggaagttacagtcagaatgcgctgtccggtgcggcgacggtaaatcagatcttctttattgtgaatcagctggcactttccatcggaaatgcactggtagcgatatgttctcagtactggggaaagcaggagacaggagcgattcgtaagatgacgggagtggcactggcgcttagtgtcctgatcggggcaatagtcgtgacagcatgcacctgtattccggagcagctcttgagaatatttacgacatcaccggagattattgccgaagggaaggcgtatcttggacttctgaaatggacatttttactgttcatgataagtaatctgctgatcgccatgcttagaagtgtggagacagtgaagatttcgtttgttatatcggtagtgtcgttgatcacgaacggttgtattaattacacactgatctttggacattttggattcccggagatgggaatccaaggagctgcagtcggaacactgacagcaaggatgctggagcttctgatcatcgtagtatatatatggaagatagatacgaaagtcagattatttgacattaatttgttcagaactatatttctgccggagaacagaaagatatggggagcatttttcaaagttgcgtttccgatcatgtgctcagggatgatctgggcaatctcggtaccgatgcagacggcgattctggggcatttgtctgcggatgcaattgccgcaaattctgtatccagcacatttttccagtatctgaaggtcattgtaatcgctatatcatcggcatcggccgttgtgatcgggaaagatatcggagagggagatataaaaagggtaaaatccgatggaaggacactttctgtgatcgatgttctgatcggtatagtactcgcttctttgttatttgtactaagaggaccacttttgtctatgtataaattaacggatacggcagcagtactggcaaatcattttattatgatcatgagtgttgttatggtgggaatgtcttatcagatgccggtatcggtaggtgtaattcaaggtggtggagataccagattctctatgtatatgaatatgatctctacttggggaatcgttatgccgctttcttttcttgcggcatttgtatggaaacttccggaggaactggttgtggttgcagtgcagtcagatcagttgttcaaggggattccggtatttttacggtttaggagttataagtggattcacaaattaacataaaaagaagtatggaatggaaagaatttgaaacaacattttcggtaaaattaaatcaacagcaaaaagaagcagtacagagcacaaaagggccggtactgcttcttgctgtgcccggatcaggaaagaccacggtactggtgacacgtcttggttatatgatctactgtaagaatattcctccggagagaatacttacggttacatatacggtggcagcgacaaaaaatatgtccgaaagatttgcagtccgttttggcgaggatatggcaaagagactggaatttcggacgatcaacggaatctgcgcaatgattatccagtattacggaagacggatcggaaagacaccgtttgaacttgtgaaggatgaaaaggcaacgacggggatgctgatcagaatctgtcaggatcatggcatgggatatccgacggagagtgatcttaagaatgtaagaacgttgatcacatatataaaaaatatgatgctgaacgaagaagaacttcaaaaattagaggaagagtcagatattcggattgcaggaatctaccgtgaatactgtaggcagatgcgagaacagaagctgatggattatgacgatcagatgttgtatgcctataatattctgcgaaaagatccgggtgtgcttgcatattttcaaaatagatatccatatatatgtgtggatgaagcgcaggatacatcaaagatccagcatgcgattattgcgctgctggcagccggaacaggcaatctttttatggttggagatgaagaccagagtatctatggattccgggcggcatatccggaggcattgctgtcatttgaaaagaagcattcgggagcaaaagtccttctgatggaagaaaatttccgctcaaatgcaaagattgtagaagcggcagataaattcattcagaagaatacactccggcatgagaagcatatgagagcggcaagagaagccggagcggatatccgggaaatttctctaaaatcgaggaaagcacagtatgtgtatctgatgaaagctgcacaggaatgtacgaccggaatggctggcatgagcggatcggaggaacataggggcagggcagatgcttcggtgacggagacagcagttctgtacagggataatgagtgtgcgattccactgatcgatctgctggaaagaaagaatattccgtatcgcatgcggaatgcagacctttccttttttacccaccggacggttctggatgtacagaatatcatccggtttgcaatggatccaaaagatacggaactgttcatgcagatctattaccggctgaaattgttctttaacaagaaagatgcattaagatatgcacagatcagtcaggagaaagatatggaggtgctggatgcggcattaaaatacggcaatctggagaaatatcaggaagataatatccgtaatctgaaacggcagatggtacgtatcttaaatatgccgggggatgaggctgtcaatcagatcctgacatatatgggatatcaggattatctgaagaaaatgggcatgaatgccaacaagctggagacggtcaagttgatcggaagcagggtagaatctccggaaaaattactggaacgactggaagaactgagaacgatcattcaggaaaaagtatcagataaggattgcccgtttattctgtctaccatgcatgcaagtaaaggactggaatatgatacggtctatcttctggatgttatggatgggatattgccggaaaaagtactggcaaatccgcggacggcatcaaaggaagaacttgaaacttatgaggaagaaagaagactcttctatgtaggtgtgaccagagcaaagaatcagctgaatgtatttacgacgaataagccgtccaaattctgcagtgagttgctgggaaagaggaatctgagagagaatcagcaaaaagaatatgcaggaataaaaaaatggggagattatagtccggcgggaacatatggcataaagggaaatggaatgtatcatggatatggcaccgggcatggatctcagaagcaacctggaaaaagctatcaggaacttgcggatgcacttggtgaaggcatggttgtaaagcataagaaattcggtgagggcgtcgttgtagacatggaaggtgagcacatccgtatccagttcggagacaatgtaaagaacatggatctgaaagttctggcaagacttgggatgctggaaatataagaataaaaaatgaccaatagtcaaaaattgtattgactgttggtcttttttgatgtatattgcaattaggtacaaaaatgaccaatggtcaaaaatgctgataagagtaagaagaaataaaaaaggatgtaaaaaaatgatcataaaaggaggggcggttatgaatatggttgcatttggtaaaaaggtagtgaagttcagaattccgatactgatcatcagtatcttactcttgattccggcgggacttggatatgtgaatacaagagtcaattatgatgtgctgacatatttaccggaagacattgagacgatgcagggtcaggatatcctggtaaaagactttggaaccggtgctttttcaatgtttatcgtggacggaatggaagataaagatgtatcggcattgaaagcaaagatcgaaaaagtagatcatgtgcagaaggttctgtggtacgattcacttgcagatatcagcatgccgaagagcatgatgccgaaagatgtctacgaagtattcaattcagatacgggcacgatgatggcaatcttctttgatgagggtacttcttccgacggaacgatggaagcaatcggggagatccgtaaactggccggaaagcagtgtttcttaagtggtatgtctgcaattgttacggatacgaagaacctggctgagaaagagacaccgttatatgtactgatcgcagttgttctggcggtgatcgtattaggacttacgatggattcgtattttatcccgttactttttatgctgagtatcggaatggcgatcatttataatctgggaagtaactatttcctaggagagatttcctatattacgaaagcgttggcggcggtactgcagcttggcgttacacttgattattccattttcctgatgcacagttatgaggagcagcaggcaagatataacggagacaaagagcgtgcaatggcacatgcgatatcccagacattttcatccgtaatcggaagttccgttacaacggtagccggatttatcgcattgtgcttcatgacatttacgcttggtatggacatcggtgtggttatggtaaaaggtgtcgtccttggcgtgatcgcctgtgtgacaatccttccatccatgatcctgtgctgtgataaatggatcacgaagaccatgcataagccgtttcttccggacatcggaaggatatcggataaagttacaaagcggtatatgatctatgtgatcattttccttgtacttttattcccggcaatctatggaaataatcatacatccgtttattacaatctggatgagacgcttccaaaggatcttccgagtatcattgcaaatgaaaaactgaaggaagattatgacatgaacacgacacacatgatcctcgtggacagttcggttgaatccgcagatgtggcaaagatgatcaacaagatggatgatgtggatggtgtcaaatgggcactcggcctggacgcgctgatcggaccggcaatcccgcagagtatgatcccggattccgtaaccgagatgctgaagaatgataagtatcagctgcttctggtcaattctgagtataaggttgcatcggatgaactgaatgtccagattaaagaactgaataagattctgcacaaatatgacaaaggcggtatgctgatcggtgaaggaccgctgacggcagatctgatcgacattacagatacagattttaagacggtcagtgtggtatcgatcggtatcatctttgtgatcatattaatactgttcaagtccatttcacttccaatcattctggttggcgtgattgaatttgctatctttgtaaatatgggaattccatattatacaggaacgaagctgccattcgttgcatcgattgttatcggcacgatccagcttggatctaccgtagattatgcgatccttatgacgacaagatataagagagaacgcaatcacggagcagaaaaatatgatgcgatcacaactgcacaccgcgcatcggcacagtcgatcatggtaagtgcactgagcttcttcgcagcaacgatcggtgtcggattgtattcgaatattgatatgatcagctcactgtgtatcctgatggcgagaggtgcgatcatcagtatgatcgtggttatctttgtactgccgtcgatgtttatggtatttgataaagtgatcgtgaagacgagtaagggatttttgccataactctggaaccacggggacgtgaaaaaatggctttttttactgtccccgttggcatccggtaattaaatatacaaagccggaatgtaaaggccggaaggataaatatattgtcatgattatgcaaacatgctacaatatgactttgaactggttcgcaaacctcccagtataaaaaactaggcaaagtacataacatgtatgattacttttgtttatgggggttctgtaagcaaaagtatttttttgccttttgaattgcagtgtattcgtaaggagctgccagtggtaggtcctgtagaagattgagaaaggaaaagaaaaatgaaaaaaagaaaagtaattattgactgtgatccgggtatcgatgacagcctggctatcatgctggcattgcagtcggaagaactcgagatagttggaatcaccattgtatgcgggaactgtccggtagagatgggattcggaaatgcgaaaaaagtgctgaagcatatgggaaggttagatgttcctgtctatataggcgtagaaaaaccgctgcgccgggagtatgtcaacgcacttgacacgcatggagaagatggacttggtgaaagctttttaccagaagtagaaggattccgtcaggagatgggagcagtggaattccttgcatcaaaactgaaagaaggacacatttccgtaatagcacttggaccgatgacgaatcttgcaacattgctcgaacaagacagagttgcgtttgatcagatcgaagaattcgtgtctatgggcggaacgttcaaaagccatggaaattgttcgccggtagcggaatacaattactggtgtgatccggatgcggcagcgaaagtatatgatgcaatgtatcagaatggacggaagatccatatgatcggtctggatgtgacgagagaaattgttctgacaccaacgattcttgagtatatgtgccggataaatgcaaaaagaggtgcatttattaagaagatcacaaagttttattttgattttcactggcagtgggaacacatcgtcggatgtgtgatcaatgatcctcttgctgtagcatattttattgatccttcgatctgtgaaggatttgaatcctttgtccagattgagacagaagggatatcactggggcagtcggttgtcgattcgatgaatttttaccggaaagaaccgaatgcaaaagtactgacacaggtagatacatatcgttttttcgaaatgatgctttcgagagtactggaagtagaacctgagagtctggatattttggaaaatgtattataagtgaggagaagtaagtcatgaaaaaaacatcaacatatagagtatcaacatataaaatctgcatcgttgcatttgcaatctgcattaatctggtcggaggacagattgcattatttctgaagcttccaatttacctggacagtatcggaaccgtattcattgcatccacattaggcccgatttatggaatgcttccgaatgtgatcagtggtctgttcatgggaatgacggttgacgtatattctttatactatgcacctgtcggtatcattcttggtctggtgacaggtctggtatatcagaaatataagccgaaaaaatggtggatatttgtggcagcgctggtaattacattaccgtcaaccattgtaagttcctgcattacggcattcttatttggcgggattacatcatcaggttctacggttctggtgcagcttcttgccaaaaccccgatgggaatggtaggagcatgctttgtggttcagttctttacagattatattgaccgtgtgatctgtctgttcgtggtaagcgcgcttacaaaggcactgccaaggaatatgatggagagattataaggtgaccttataaggaaaatttgtagagaaaagttcataaaggcgattatatagagaaaaatttatagagaaattaaaaagagaacttatagaggggaaggtagaaagtgaatgtattgataacaggtacaagttccggaattggaaaagggtgtgcgaaatattttctgaaaaacggacataaagtttatggatttgaccggaaagaatctacaatagaacatccggattataagcattattgtctggacatccgtgataaagagatgtatccagaacttccgcccatgcagatcgtgatcaacaacgcaggtgtacaaaatgaagatgatattgatatcaatctgaaaggaaccattgcggtcacagaacattacgcagtacagccggagatccgatctgtgatcatgattggatctgcaagcggccataccggatcggaattcccggaatatgcggcaagtaaaggtggggtcctttcatataccaaaaatgttgcgatgagaattgctccgtatcaggcgacctgcaacagtatggatttcggcggagtgatgacagagttaaataaaccggtgatggaagatgaaaaactgtggaatgcgatcatggatctgactcctttaaaacgctggatgagtgtggaagaagctgcagaatggatttattttatggcggtgcaaaacagattctgcacaggccagaatattctgatcgatggactggaagcaggaaacagtaattttatatggccggagtagagatcagataaaaccatagagaacggtgtagaaaagaggtatagaacatggagtttaaatactgtaaattagaaatatttctcccgccgacgcatctggaagttgtgcagaaagcactgcaggaggttgatgcgggacatatcgggaactatgattcgtgcatgtcggtaagtccggtaacgggttactggcgtccgcttgacggatgtgatccgtatatcggaaccaacggtgagatcagctgtgaaccggagttgaaggtggaagtaacagtgtatacagaaaatgttgataagacgattgaagccgtgaagaaagtacatccgtatgaagaaccggtgatcaatgtgataccactgtggagaacaagcttttaagtctggagtatataagtaaagccgttgatgctaatttttgtggttacagcacttcaatgcgccttggaaggaggagaacgcatatgtcagaaagaaatcatgaagttataaaaagtcagcagcttttagatgaatatggcaatattgcggagccgggctggtcgagaaagcagttgcagcaatattcaagaacacagatcaaagcaccaaagttccggatcaaagaatgggactattatcttgtagtgggtgatgattgtgctgtggcatttacactttcagatgacggttatgtgggattgcagtctgtgtctctgcttgatttttcgggagaaccgtgggaacatacggagacaatattagatgcatttccgatgggaaagcttaggatgccggagaattcgtcggagggtgatatcatttatgagaagaagaatctgagactaaagtatgtgttggaaaatagtgcgtcagaatcagcagatacagcagaagaggaacataatgagaaaattacaaagccggctataaggatacgtcatattacatgccagtttgacaatttttaccagggcaaatcattttcctgtgacatccggctgcgtcagccggatatggataccatggtcatcgcaacaccatgggatcggaaaatgtgattttctatgatgggatagcgcataagatcgatgatgtagaattcgtgataccggaagatgattactgtaaaccatggaagtttacgtccagtgacagcagattcgagatggattttcttccaatattagaccggtcggcatgcctggattataaactgatcgtgtcggatcaacaccaggtattcggacggatgagcggaatggcagtgctcgatgacgggacaaagatagagataaaagacgtgctgtgctttgcggaaaaagtacataaccggtattagaatgtgcctgaaaaatcagttccacaattttcagacatactctgaatcggtggaaaaacagccgggaaaatagccggggaaacagcaggttgctttccggtcataagcttttctgctaagatatcggtatatcgataacggaggtagatgcgatggaaacaaaggatgttatattagaacttcgtacgaagaaaggtttatctcaggacgaactggccggcaaagtcatggtcacaagacaggcagtatcccgctgggaaaatggggaaacagttccgaatacggagacgttgaagcttttgtcaaaggaattcggggtgtcgatcaatacgcttcttggtgcacctagaaagttaatctgtcagtgctgtggaatgccgcttgaagatgatgaaatcataagccatgacagtgacgggacgctgaacgaagactattgtaaatggtgttatgcggatggcacttatacttacagtaatatggacgatctgattgatgtatgtgttaaaaatatgatcaatgagaatttcacggaggaacaggtgcgggcttatatgaaagatctgcttccaaagttagattactggaaacaatatgaggagcttggtgacaatggagaatttgaagcattcaagaagcagctgatacaggaaatcaatgatcttcatatagaaggaatgccgaaagttgaaaagctgaatgcgcttgtcggaaagtatgtgaatctggaatatccgctgccgaatggcaaacgtgtgaagttactggatgaccagacgacgtatctggggaatcagctggagtgtgagtttggcggcgacaggtgctttggagtgctggcggggatggattttattatggtttgtacgtatgaggcgggaggcgaaaatccggagctggtggtgtataagaagaggtgagtgaatagtaaataagcgaaaccatggaaaaaggtgtagaagaaaaaacacttttttctatgttttttttagtaagttctagtatggtattaataatgttatttaaggtttaatttagtcaaaaaccgatttatagtgatatgtgctattttataattcttttgaatgaattagtttggtttctgttataattatttgcatacgataaatgctaatactgtggtataaaaggataataaattgtgcattaagtatatttgaattaatgcaaaaagaatttacagaagggtataaaaataatttgtagaataataattgcaacgtctatggaaagatatatgggagaattaagtaacaagacagattttgagtttaaagcgagtttattattattgttatataatagaaatatttccaattattatccaagaataccaaattgaagtggaagcaactttgtgggggcaaggtaaatgcgtagaatttttacaacaagtagctgaagatttatcagaaaaagtaacagcaagaatagctgatttgaattctcgccctgagcaattaagaataccacttgaaagtgaaaaaattatagaagattaaaagatagcctgtcctttttacgggagaggctattttagtaagaaatgtcgtagtagtaacctcttccacctttactccgtttctactacgattgctgtacacatcttgcaaaattttgctaagatttgcattttatatacagaaatgaccaatacataaagaaaaattaacaccgcgcaaaacgctgcaaatggcagtaggaaagcgccttttgaaaggagtttatatgagtatacgagtgatctttatctgccacggcagtgtttaagggacggagcaaaagccttgattttattgggtttcttggatggaaatgtagaatttacaccttatttacacctttggaagatcggatcggtatagttagaagagggaaggcgtgagatgaattttacgtaagcatatattacttgaaaaatcaattgatatataacaaattataaatgtgacgtaaaaagagtcatgtttgtaaaaagcttccgttagtatatcgtggaagatatgatatttttacagtactgctgtcagaaggagatacaaccataacattattgtgtgaaagagtaaattccaccgcccagttttgtaaattgttgaaagaaatatattgttatatgattacgtaagtgatatatttaagcataagaaaaccgtgtaaaattacagtttgctttttacacggttttctttatactagatagttagctaaaactaacatgatgaaagtatgaaagattatagaataacatatattaggtattaggcaatataatcaataagctatagaactaatactataccgctgaagataattatttttgccaatgaattttttcgagcatatatggaaggaaaatataatgcgaataaatatttttgaaggtatactgattccgtttgttggaacaacgataggatcagcatgtgtgttttttatgagacaaacacttaataaatccgtgcaacgtgcacttgcagggtttgcagcaggtataatggttgcggcttcaatctggagtcttctgattccggcaattaaacaatctgaaaatatgggaactttatcgtttgttccggcagttgttgggttctggattggtatattgtttttactcgcacttgatcatttgattccgcatcttcatgttggaagtgatcaggcagagggaccgaaaagcaaatttggccgtactacgatgatggtgttggcagttacattacataacatccctgaaggtatggcagttggtgtaatgtatgctggatttcttgctgaaaatgcacagattacagcaacaagtgcactagctttatcacttggaattgctatccagaattttccagaaggagcgattatatccatgccgcttagggcagagggtgaaagtaagagaaaggcatttctgagaggtgtactttcaggagtggttgaaccgattggagcagtactgacgatttttgctgcacagctggtaatcccggcattaccatatttgctcagctttgcagcaggagccatgttatatgtcgtggttgaagaactaattccggaaatgtctcagggacagcactcaaatattggtacgcttttctttgcacttggatttagtttgatgatgatcttggatgtggcactggggtaagaggagaggaatgtaaaccctcaaaaagacatcccctcaaaaactttgattaccaccaaattggaaggaaagataatatacataatcattttccacaccaacgattcctttttccatttccgtgataggaattcctgacagtccgtcttttccatagattagagccattaatccctgttcagagtctgaaaggatagcagtcttgccttctattgtcgaagctgaatgaatctgaatcggaatctccccttttatctggcttgcacttctgccgtaatattctctgttttctatattttctaaaataggaaaatccgtagaatattttgcataatcatctgctacaattaattttaccttaaaagattcaaaatccggcacaacagcaatgacgcctctggaaggggaattgattccgtcatagtccaaatcagccactttacttttactgatcagtgtcccaaactgatattcagatacataaatggtgagtgttttaaattcatcttttgtaaaataatgaaaaagatatgcgccgtctgttcaggataataattctgttgttttcatctcagtacttgtctgatcaactgcggtaatataattttttggctgtatcagtttgtgaaagaataaagtgccaaggatcgcagagacaattactgcaaaaacagttactacagcaagaattgtttttaaatttttttgtttctttttactctcttttgtaatctgaataagattgctgtctgatttttcaattacattttcagcatcgatatctttacctgcaagaaattcattaatgctgattctaagtatgctgcacaattccatataaattgacacgtccggcaggcatatgcctcgttcccatttagaaaccgatttgtcactcatattcagtttttctgtcaattgcttctgcgtcagtccaagagcttttcttttttctgcaatatattttccgattttgattaaatccatataattcactcccttctgtttaatctaagcataatataaattataagaaatgaacaccccttatgagtagaatgcgttgagtatttgagttctggctgaattagtgatagattaggacgcaagagttgattgacgttggataatgctccataatataatgaaaagaaaagaagaaaaggcagatatctatgcctggatagatggagaagaacctatggagaaaaaaagaggaattgattcgtttacactacatattctggcaatgctgtttatgttatgtgatcatttgtgggcgacactatttccagcacaggaatggatgacatgcgtaggaagacttgcttttccgattttcgcatttatgatcgcagaaggatgctattatacttcgaatgtgaaaaaatacatgctgcgtctttttctatttgccataatttcagaaataccatttaacctgattatgggaagttctgtattttacccgtttcatcaaaatgtactatggacctttttattaggggtgttatcgatacagatcattgaaaaggcaaagaagaaacaaaagaaatggatatcgttttttgtggtttgcctcgtgcttttgatggattttctgcttggaaccataaccatggtagattacaatgctgcaggaatactgacggtattgcttttttatttttttcgcaagaaaacctggatttcttttgcggcacagcttgtcgggctgtattatttgaatgtagttatgctggggaatctgtattatccggtaacgattctgggacatcattttgagattgcacagcagagctttgcactgctggcactgattccaatctggttatatcatggagagcaggggtatcatagcaagtggttcaagtatttctgttatgcgttttatccggtgcactttcttatcttgtttgttatttggcaatggcgtattcggtaatagatcagcagcggaaattctggataaattattatagaaagtgatggggaaaagaatgcagacttatacttatgtttcaaaaggaaaatttgaattaatggaaaagccaaagcctgtgctgatgcatgaaagagatgccattgtaaaggtgacacttgccagcatttgttccagtgacctgcacattaagcatggaagcgttccacgggcagtgccggggattacagtcggtcatgagatggttggaattgtggaagaagtcggaactgctgtgaagaatgtgaagtcaggagaccgggtgacggtaaatgtagaaactttttgtggagaatgttttttctgcaagaaaggttatgtgaataactgtaccgatgaaaatggcggctgggctcttggatgccgtatcgatggcggtcaggcagaatatgtccgtgtaccatttgcagatcaggggctgaataagattccggataaagttacggacagacaggcgttatttgtaggagatgtacttgccaccggttactgggcagcacgtatttccgagatcactgaggatgacacggtgctgatcattggagccggtcctacaggtatctgtaccttactgtctgttatgctgaaaaatccgaagcggatcatcatgtgtgaaaaagacgaaaagcgtatgcactttatcaggaaacattatccggaagttcttacagtttcgccggaagaatgttttgattttgttcaggcaaacagcgagcatggtggagcggatgttgttcttgaagttgcaggagcagaatctactttccgtcttgcatgggaatgcgcaaggccaaatgcaatcgtgacggtggtggcactttatgataaagcccagacgttacctctgccggatatgtatggaaagaatctgacttttaaaacaggaggagtagacggttgtgattgtgaagaaacgctgagactgatcgcggaaggtaagatcaacacggaaccactgatcacacacacctatccacttagcagaatcgaagaagcctatgaactttttgaaaataagaggaacggcgtgatcaaggtggcggtagaatgttaaatataatagataatagaaataaaagatttccaggcatcggagttagaggttttcgcaaggctcacagaagcacagcttttgaataaaaatcacccggagaaaggaatttttatagcggaaagtcccaaggtgatcgggagggcgttagataaatcatgaaaatagcgcagcaaatatctgcgtgtggtagaatagtgttcgaaaatgggttagtagaaaaaagaaaaacttttagaagaaaatttcattaaaagatgtgctgatacttttgcggatgaacgaggtcttgtaattccgttggaagatagtgatttaataaaggcattagaggattatcctaatatgggagttgatgcaatagaaaatattcttgcaagcaaatatgaacaaattgtttttgaaaaataatccttaggagtaagaatttacctgttactactaattttactactaacaggtagtaacaacatgctctattctgctttgatttgccacattctgtaatttcagagcatatcaccataatcctagaatcccttgaaaaatatggcattccggggcaatttaaggagaaataaaactatgataaaaatactttttatctgccatggcagtgtttaatgtatgctgtgaaagccttgatttaatgggattttctagatagaaacaaataatttacaccttattgatgcctttggaagatcgaatcggaataattaaaaaagttgtcataattcagttggtcaaaaaataatactacactcaaaattaattaaaaaatcaatcgtaaaaaaatacgattgattttttgcgcatttttgcatataatataatcattatggttggaaagggaacgattactatgcgtgaaacaagaatattagaattcaaggaaacgattacgaatacttttttgaaaacagttagtgccttttcgaattacaatggtggaacaattctatttggggttgatgataatggaaatgtgaaaggattgctagatgtaaaacaggcctgtctggatatcgaaaataaagtcaatgacagtatatcacctcaaccaaactatacacttgaaatacagaataatgaccagacgataaaacttactgtaaaaagtggtcttcaaaaaccgtatttatataaatcaaaagcatacaaacgaaatgatacagcaacgatagaggtagatacattggaattttcaaggcttgtattagatggaaaaaatattagcttcgaagaattaccttgtaaagatcaggagctatcttttgaaattttacagtgtaaactgaaagaaaatatttacattgaaactttcaatcaagatactttaaagacattgaacctgtatgacaatataaatggttataataatgcagcgggacttttggcagataaaaatcatttttcaggaattgatattgttaagttcggtgagaatatcagtattattcaaaaaagagtaacgtttgaacatatatcggttttagaaatatatgaaaaagcacttgctgtatttagagattattatcaatatgaagtaatacagggggctgacagaaagatggtagagaaaataccggaagcagctttcagagaagcaattgcaaatgctttgattcatagggtatgggatattaattcacacaccagagtttctatgtttgatgatagaatagaagtggtgtctcctggtggattgccggctggaataacggcagaagaatatttatcaggtaaactatctattttaagaaatagaaatcttgcaaatgtattttacagactgggattagtagagatatttggaacaggaattacacgaatcaaacaactatatgcagagagtttgataaaaccagaatttgaagtgtcagaaaatgctataaaaattgtactaccgatatttgaaacgaatgtcaatttaaccgaagacgaaaaagtgatttacaaatttttaagtaagacgatgctgaaaccaataagtgaaattgcaccatatgtcccatttggcaaatcaaaaacaacacaattactgaaagctatggagaaaaagggtgtgattgcagttgaaggaaaaggcagaggaacaaaatatatcattaagtgattgagaacatagagggttcaaattacacaatctttcaataacacaaggagaaaatcatatgataaaaattttattcttatgccacggcagggtgaacggactaccgaatgtgtaggtaaaagtgccgcagaactgggcatagtacggcagtcatagtgccacggaactactgaaggactacttctcaggcgagttaaagtggattgtgtagaagtaatcgttaagagagtatatatgtgaaccccttgggaaaatcgttaatagagttctacggggaggataccgatcagatcgtggaagacctgccggtagatcgaaaatacaaattcaaatccggtgtcaacattatgtttgggtgcaacaacttctgtagttactgtatcgtaccgtatgtccgtggccgtgagcgaagctggaatccggaagaggttgtaatagatcgttttgaccgtcttttagcgcaggtgcaggaaattgcacgagaacgttcttcccgttttgagggaacggtacaggaagttctggtagagagtgtcaacgatcaggatgcatctctggtaaccggacgaatgggcaataatcttctggtacatttcccgggggatgcttatatgatcggcacattcaaacagattcatctggacgtatgcaagggattctactatatgggaacacctgcagaatagaaaatgttacagttcactctgacttttgcctcaatatcatagaatagtatcaaaacagaatagtaatgtcatagaaaaagtatcatttcagtagtaaaatactggctaaaagcagacggtatttggagagtaccgtttagacatcaggaggtaacataatgggtaagaacacgacaaatgatatgacgcagggaaactgcatgcgtttactggtacagttttttctgccgatcctggcaggaaatctgtttcaacagttatacagctttgcagactctatggtggtgggaaaaggaattggcgatacggcacttgcagcagtcggaaataccagttccgtacattttctgatcattggtttcgcaattgggctgacaggaggattgggaatctgtatttctcagtcttttggaagtggcaattatgaaaaacttcgtaaggagctggcaatgtctgtctggatctgtctggctattgggattgtgatcacagtggtaagtctggccttcatgcggcaattatttacatttctccatacaccggaagatctgatgacggaaacactgcaatatttcggaacaattcttgcgggaaccaccattacaatttttaataattttgccatgacacttctgcgttccgtcggaaacagccgggtgcctctggttgcaatgataatttccgccattgctaatgttctgatggatctgttattcgtttttccgctgcatatgggtgtttttggcgcagcgttagccactgttctggcacaggttctgtctgcgctttactgctgttactacataggaagggaaaaaaatctgatcccgaaaaaaacggactggaaaccacagagtgtgatcatcaaaagactgacattgaaaggtctgcctgttgccgttatgaattctgtcactgcagtgggtggaatggtgttgcagacatttgtcaacaatatgggaacaagctatgtggctgcctatgcggcatgcaccaagatcctcagtctttttgaacagccggcaaatacagtgggcctggcacttcttacttttgtgggacagaattatggtgccggaaaaaaggagcggatacgtaccggtatccgggaaggagttatcctgacgatcctgataaatattccactggctttgatgttgctgtgtattcctgagtttctgacttctttcatgttgaatgatgcgtcgattatttcttacacaagagattttctggcgtttacaggcatctgtctgtttcctctgggatggctgtttgtgttccgcaacgggtgtcagggcatgggacatacgtttgttccgatgctttcaggagtcctggaagtgtctcttcgagtggttatggtaaagctgctgactccatatctggcttttcgtggtgttgctctggcagaagtatctgcctggatcggcgcctggatcatgttgatgatcacttactggatctatcaggaaagaacggattcttttcggtaagtctgaggagaacatcctaccttggtgcgaaactgtcgattgaaattggacgttcaggattaaattgttcatcaaggatattttgaagtttgctactgaaatcggagtctcttgtggtgattgtccatggctttacccactgagccttaatgcccatttgtttcatgtactgcccaacagtacgcacggaaatagtttctcctgttttgcgcaacacttgtgtgattttgggagcgccgtaattctgtctagattgatcgtaaatatccttgattttggcttttactgattcccgacgcttttcagcattggaaggaaattgtttgtcatagtgctttgccataatgagatcctccttcagtgcggtaactacatagtaccataaaatttgtaattagggattctcattttgacttgtactatttatattctagcaccacgcgcctgccattgtatcgttaaataatgaggattacaacgaagaaccggaaccaaattttgacgaagaagcagacgacgaagactaaaaaagagagtgtgttatatatcgaagatataacacactttctaacgcataaagttatagagaaaatattctcatttatgaggagaaatgaaaatcaattaaatataaaaatgtgcaaaaatgttgaaaaataaaggcttatcgcctcaaatccgttggcacgaaaggagataaaaaaatggtcaaaatactatttatatgtcacggcagtgtttaatggatgctgtgaaagcctaggctttaaaggattttttgatgattgacgaataatttacaccttatttatacctttggaagaccggatcggaataatagagaaataaagaaatagataaatataacaggaagcaattttgtcatattggaaataattaaaatttgctgaaccgtgttgattttattgattgagtataataaaagtaagaacagaaacttccatgtttgaagcggttaccagaattgacaaagaaatgcaagttagccaatccggtagtccagcatattttttcattgtcacccgacgtttttacaaaacatatacttattccgcttgatgcgtcattcttgttctgaaaacaggaacagaatccttacagcgactgtaagtgttatttattgtgcttctgtgctatcatttacccagaaatggataggaggcattcacatgaaaccaattttgaatattgaaaatcttaccaaagtctatgggacgttgccaaaccagacgagagcactgaacggaatcacttttcaggtcatgccgggagagtttctcggtattatgggaagcagtggttccggcaaatccacgcttctcaactgtattgcaactgtgattcagcctacaggtggaagcattcaggtggagggagatactctgcaatccctcaaggaaaaggctcttgccgagtaccgtggcaaaaaagttggttatctattccagaactttgaattgctggacaacctgactggcagggaaaatatcctgctcccgacttccttgcatggggtagccgaaacagaaagcagccagcggctgaagcagttggctgactatctggaaatttctgatgttctggataagtttccgtccaagatgtccggtggccagcgtcagcgtgttgcggcagcaagggctctgatcttacatccccaaatgatccttgccgatgaaccgacgggtgcgctggattctaagaacgcaagaagtcttatggagaagctgtccggcctgaatcgtgacgaacaagctacgatcctgatggtaacccatgattccaatgccgccagcttctgtaagcgcatcctgttcatccaggatggcgtgatctttcatgagcttcggcgtggagacgaaagccagcaggagttctacgggcgcatcctgaaggtgatggcgcaactgggagggggcagcgcaaatgttctctaatctcattcttcggaacagtcgccgcagccgaaaggaaaacggtctgtttttcagctccctggtgatttctattgttgcattttacatgattctttccatctccactcaagatgtgatgctctttttgcagaaaatggagagtgacgcagttgacaaactcctgcttctgattcctgcgttttatgggatgaccctcggtattctgttctttttgatctattttgcctgcaagtatcagttcgagcgcagacggcatgagtttggtgtttatctaatgttggggatgcgtagaagtaaactgtttggtatgcttctggcggaagatttcctgaccagtattcttgccatgctcataggattacctgtggctgtggtgctttcagaaattgtcagtcttgtcaccgccaagctggtaggcatggggatcatcggtcatcagttttctttatcctggtttgcgattgaatggacgctggcaggatttctggcaattaagctgacggcacttctgattttgagtggacgaatcagccgccaggagatcggtactttgctatcccagccaacgaaccgccccaaaaagcaaatgccatctgttatctatggactggctgctatatgcggaagtgtgatgttggcagtggcttactacatggcgattcagggaattgcatggacaaaggtaagtatgatgggactgactttgctgttgggcatagttggtacgatgctgcttttctatgggatgcgtgcactgattgctttgattgttaagaaaggaaaaggaaataagcagcttcatgtatttaccttccggcagattcaggagaatgtcattcatcagtcaaactccatggccatcagctccctgctgattctggcggcgctgtgttgttttggtgcgggcgtaggaattgcaggaacgaataacctgtcttctggccatgtaatcgactatacttttgaagatcatactgcagaagattcatcgcaggttcttccgaatataaaggcagtcctgaaagaaaacagtttggaaaatcaattttcagagctttttgaaatgagggttgggcgtattcgcaccacagaagattatgataatgcctacagcatggacgctgttatggactctcttcggagcctgccccagtcggaagaccgggatgtccttctgaacaatcttggttatgccacatacccatatttgatttgtttatcggactataatcgtttgttggaattgtccggcaatccggctctccaattaggcgaaaaggaggccgctgtctatattgatacagagtttactacggtaagccgtaccgcaatgctgaaccaagtattggccgggcatcccaaggtggaactggatggtagtccgattcatcttacaggagaggttcagtctgtgaatttggtcacggaccgttctataaccttgtcctttgcattgattcttccggatgaagcattcctatattatagtcagggaatgtatgatacctatgtcaatgcggtgctcagtgagcaagctctgaatggaaatagccttataactgcatatttggatttgaacgagaagctggacgaaactgacattgaatatgaaagctatcttcagaatatgggtcgtcagcttttctacaccatagcatccagttatattaccctctatcttgcgattgttttcctggtagttgccaacaccatcgtgggtgttcagttcctgatgagtcagcagaaaaccgggcgcagataccagactctgatccgcctgggagctacttacgaaaccctttgccagtctgctggaaagcaaattacctggtttatgggacttcctgtattggttgcggctgtcagcagtttgtttggagtcagggcgttatttacagggatactctcgtcccgaacccgtgggacagtggctgaaatgatgtttgtatctgctgctatgattttgctgctttgcgtgatagaatatatttatatgagagtggtcaagcgctccagtgatcggtatttgctgacactgatgcagccacagagagaagaataatttggaaggaggtgctgccgtgaaaagaattgctgttgtggaagatgaagtctatatgcgggaagaactctgcaatatgcttcaaaaggacgggtatcttgcggaggcaatcaccgagttggaagatgccgctcggctcctggcagccctccgtcctgaccttgtgatcttagacctgaatttgccggagatcagtggctttcaaatctgccaggaactaaagaataaaaccgctatccccgtcctgatactgacttccagagatcaggtaaaggatgaactgcaagcgttccacttgggtgctgatgaatatttgacgaagccgtgcagaaaagatcgacttcttgccagggtatccaatattctcaaaaggtatgaaggccgtaccaatctcatagagggaccagatttcctgttagaccagcagacctacacgctttatattcataatacctctgtcgtgcttccaaaaaatcagggaaaactgttggttgctcttttgtccggcggcgatgctctggtcacgacggagcaactttgcatagcactatggggaaccacggaatacatagacgaaaatgccttgcaggttaatctgaccaggctgaaaaagacgatgtccggtcttgagatgaagcagcgaatcgttgcggttcgtgggatgggctatcgtctggaaacgggggtggctccatgaagcggctttggcgcatgatagaacggtactacccctggctgctgttgctgttgggcgtggattgcttttgtgctatcattctttggatttctgacattcaggcatttcaaaccttgagtgggttagtagttctgacaagcctccttttgttttcagcaattctgtttgtactaaacaagcgggagaccacccgccgagagctgttccgggatttcctcagtgatcctaccatctgcaacgaggaacggctgctcagtgccatcagccgggaagaaggagaatctatccggcttctggcatcagttttacaggaacacaaaactgagagtaacagtatggcagatgccctacaggactatgaagaatatgtggagggctgggcacatgaagcgaaaacgcccctatcgttgttgaccatgctcctggataatcggagcaacgaaatgtctcctcccctgcaagcaaaactggattatgtccgcagtcagcttcaggaggatgtcactcagatgttatactatgcccggttaaagagcagtacaaaggattatcagtttaaggatatcaatttgaatgactgcttgggggaagttctggaggactatgccccacttctggaagaaaagcagtttgtaattatcaataaactgcaatctgaaacagtctatacagaccgtagagggcttcagtttatgttgggacagatcgtgagcaatgccataaaatatagcagcgatagtcccatgctaacaatctctatgatacattcggagatcgcagatgtcctttcagttgaggataatggcatcggtgtaaaaaaatatgatctgccgtatatttttcaaaagggctttaccggggattctactgacagcagaaagaaagctaccggtatagggctttacctggttaagaagatggctgacgatctaaacctttgtctggaagctgcttccccgtgggaaaagggctttaagatagtcatcttctttccaaaattgaaatccaacggaggaaaataatataagcaaaaaacggggctgtaaaataagtctctgctaaagaaacgctagttccgacaaatgctggttctggcgtttctttacattaatatatgttttttgaaaatcgtcactgttttatgtaaaaagggtacacttaataagcttggatagatttcttctgtacgtccatattttttatatcttacatgttgttttcgtttgaaaagaaatttacgtccattagggcatataggatttccgttctcatctcttatatagtttacagcacgataaggattcgtgtgatgttttttatctgccgtttcttttttgtacatggtaaatatcattaaatttttccattaaaggtacaaagcattccatgccttgtcttccataaaatcaattctacgttaaaaacataccgtctagacagctattttttaagctatcatttgaaagacatatataatatataggctcaaatggtgaaagtgcccatttgggcctattattgtatgaattcatacgttacaaccagagcaagatccacccgtgtattacagtattgtcattttgacaatattgtattacttacgagtggcagacttgatggggattacgtccccatacccacgtgaaaatataattgctggcaattacattttagcagatatgcaggcatatctgaataagcgtcatagacaacaaaataaggaaattttgataaggcattcacctggaataggtgagtgtttttttgttttcaaatattcaattaatcaaaaaaattaaaaaaatttcattagggggctgtaaaaatgcctctcagcgtttcgttttatgtaagggtattttggacaggaaaaatttaaaaaatttttatcaagaacctgtatttatgcccttcatcttttgaatatgtgtaaggacatttttgagccggtataaaaatgatttttacaacaattagaaacagaaacgaggcgagaaaagaatgaaatatgaatacatgaaggagtcagagcagatgcttcagtacttccagtttccgaagtttttgctcaaactgcgcatttcccaaactgcaaaatttctttatatgattttgtatgaccgggcacggatatcgagaaagaatagctggatagacaagtatggaaatgtttatctgatttttccgatagaggaattgtctgctcaaatcggcaaatgtaaatcttctgtaaaaacagcattgaaggaattagatgatgtgggactattggttcgcagatctggtggtttttcaaaacccaatcatttatatgtaaaaattccatctgatgagattggtttacagctggttgagaataaggcggttgaaaagatggttgcaacagagtcggaaaagcaaccttcatctggtcgtaaaaatggctgtgcaggagtcggaaatgtggcacctagtaaagtaactgagaaatataaaagaaataaatatcatgaagtaaattattgctatggggaaggagagagtttgtgatgagagaagaagatactgtatgtgtaggcagtgatggtttgcaatactgtaaagtctgtggggaagcgaaagaagcattttttcctgagggtggatttatggggatgaagaaacattccaggcaatgtgcctgtgacagaaaagcgtatgaagaagaacaaaaatattttaaagacaaagagcaccgggaattagtcagcagaaatacgagcatctgttttgacgagagcagaatggaagagtggacatttgagaatgcagatatgtcagatacggtaatgcatagagcaaaaaaatatgttgataactgggaggaaatgaaaagaaatcatataggctgtttgttctggggaccggttggtaccgggaaaagttttattgcggggtgcattgccaatgaacttcttaagcaagaagtaatggtaaagatgacaaatttcaataccattattgatgatatatttccactggcagacaaaacggaatatatcaatgcattggcgtcttatcagcttttgattattgatgatcttggagtggaacgaaattcagaatatgcgttaggaattatttttagcgtcatagatcgaagaatccgttcaggacgacctttgatcattacgaccaatcttccgctgaaagaaataaaaaacgagaccatgttagataaaagacgtatctatgaccgtattttagaaatgtgtacgcctatgtatgttggaggcacaagtaagagagaagtgattgcaagtatgaaaatggagaaagcgaaaacgttgttgaatacaaacagaggggaggaggactgcgaatgaatcatacagaaaaaacaatacctgtttgggagaaatattctttaaatgtatccgaagcagcagaatattacggaattggagaaaagagattgagacaaatcgcaggtgaaaatgagggagcggatttcattttggaagtaggttctcatattcgattcaaaaggaaattgtttgaagattatctggatacagccagcacagtttaagtgacagaatagaagaaatagtaatgaaaataatattcattttatcttagcgaaggaaaggtcttgtggtataatgaataaaccgagacggtcttccaagttaaatgaacatttgatgaaggagactaaaatattatgagtgaaaaaaggagagatcatagaggacgtatattacacaatggagaaatacagttatctgatggcagatatcgatttaagtatgtcgatgagatgggaaaggagcgctgcgtatatagctggcgcttagaccataacgatgcaactccgaaaggaaagcgccgtactttgtcgcttcgggagatggagaagaaaatccaggcggaccattttgagcagattgcaacaaatggcggaaatatgacggtactggaactggttgaaaaatatatatcaacaaaaaccggtgtcagacctactacagttgcaggatacggaacagttatcaatttattgaagaaagatccatttggaaaaagaaggattgatacggttcggatttcggatgcaaaatgttggctgatacatcttcagcaggtagaaaagaaaagttatagttccatccattcaatccgaggagttcttcgtccggcatttcagttggcagtggatgatgacctgatcaggaaaaattcatttcagtttcagctaatggaagtggttgtgaatgacagtgtgacaagagaggcaatcagcagggctgaggaacgaaagttcctacggtttgtgaaggaggatcctcatttttgcaggtattatgaggggatttacatattatttaaaaccggccttcgcatctcggaattttgtggtttgaccatttctgacattgattttaaggagcatacgatcaacatcgatcatcaattgcagaaaaaatcaaaaatcggatattatattcaagagactaaaacaaccagcggaacgagaaagatacctatgactgcagatgtagaggaatgctttcggaaaataatagaaaaacgaaacccacccaaagcagaacctatggtagatggaaaaagtggattcttatactttgataaaaatgaaagtatctgttattccctgcactgggagcattattttcaacacatcattcagaagtataataatacttataaagtacagatgcctgtcattacaccgcatgtatgccggcacacctattgcacaaatatggcaaaatccggaatgaatccaaaagcattgcaatatttgatgggccactcagatatcagcgtaacgctgaatacatatacgcatgtaaatcttgaggatgccagggaagaagttgcccggattcaggttgtgtaattacgatttttaattgaaaatagcaaggtataaaatagaaaaacatacaccttattttacaccttttgcggacgatattatgcgaaaataaaccaggttatgccagaaagcaaaaatttacaaagacttacaaagcccgaaaaaccaagaaaaactaagaaatgcgaggttatgcaacaatgataaaagtactctttatctgccacggcaacatctgtcgctccaccatggcagaatatgtaatgaaagatttagtaaaaaaagcgaatctggagtcatctttctacatcgactctgccggaactagtaacgaagaagatggcaatccggtacactatgggacacagaacaaattaagagaagaaggaatcccgtgtgggaatcacagagcacgtcagatgacgcgaaaagattatgaagagttcgattacctgatcggcatggaacagtggaacattcgcaacatcaaccgcatcatccggaaagatccggaacaaaaagtacatctgttactggaatatgcaggagatgcaagagatattgcagatccgtggtacacggggaattttgatgtgacttatgaagatgtgaaagaaggctgcgaggcattcttgcaatatctgattgagaatgaaccgttatattagaaacaataggaataaacaataaaaaggaatcatcttaagtattcagataattttgtatacatttgatgattcctttacattttttcgaaaataatttcatagaatttaatgtaatataaactccgggtacaattttacatagatttaacatagatttgatataggctgcatacaccttcgttacaataagcccgtaacgtcgagggaacatcatgtgttcgaaagaaactgccggcggcaggttctacagaagacgaatgaaggagaatgggaaaatattatgaatgaaaaattgcagataatattcgggcttttaggaggcctggcagtctttatttatggaatgaatatgatgagtgagtgcctgcagaaagcggcaggagaaaagatgaaaagcatcctggcacttctgactaagaacccggtacttggggttatcgcaggagcacttactacagcggtattacagagcagtagtgcgacaaccgttatggcgatcggttttgtcagtgcgggacttatgagtcttccacaggcaatctcaatcatctttggtgcgaacatcggtacgacgatgacggcacagatcatcgcatttaagatcagcgattacatctatatcattatctttattggatttatcatttcgtttattgcgaaatctgaaaaagtgaagagtatcggtcagacaatcttcgcatttggtctgttattccttggaatcgagaccatgggagatgttatgaaaccgctggcatccagcccagtgttcacgaatctgattgaaagagtagcacatattccggtacttggggtatttgtcggaacactaatgacactggtagtacagagtagtagtgcgacgattgcagtattgcagaactttgcatcacagccgggacctgatggtgtgacaagtatgcttggacttgcaggtgcgatcccaatccttcttggagataatatcggtactacaattacagcacttctggcaagtatcggtcagacaaaagatgcgaaacgtacagccgttgcacactgtattttcaacatttccggatgtctgttatttatcgggtttgtgaaaccatttgcagcgctgatccagcatatttctccgaaaggaccagaagttgaggtgatctcaagacagattgcaaatgcgcatacattattcaatattacaatgacactgatctgggtctgtctgatcaaattcatggtgaagattgttatgacgttgattccggatggaaaagcagtcgatatggattctgcaaaaccggtatttttggatgataaaatcataaaccagccggcagcggcacttcagttggttgcaaaggaaattcttcgtgtgagtgaaatggttaaagttgttgtggcagatacgatcacaattgtcaaaactgaagatatgaatgaactggaaccactgcaggaaaagggactgcagattaagaaactgacggatcagatcacggaatatctggcagctttgttctcagccggaacgatgacagagcagcaggctgcacagacggcaagtcttatgtacatcttaagcgatgtggaacgtatgggaacgctgagtgtagaagttgccaaatgtgtacaggaaaagattgaaaacagatacaaatatacaccggaagcgatggaagagttgcagaaaagcctgaagacactggagaagatgtttaccgattcaatcaaggcattacagggtgataagtcagttcagacagagaagctgatcaaacggaaagataagatcatggatctggatctgaagatgcgaaaagcacatgtacagcgtgtcaataaaggaaaatgtaaagcaagccttacgacaccatttacgaatatcttgcatctgatcgatcgtatgggaaacagctgtgtcaaccttgcagatgttgcgtctaatgaaatcagtctgaagtattttatggtaaattaagaatatgagagatagaaaagcctttgtggatattaaaatgatatctgcaagggctttttttaatcatcctgtgttctgtagatagctaagtatgcaagaaaaattgccagtgttatttggggtaaatacatagaaaacaaaattcgagacatactataaaagaaaaataatgaaaaatacatgaagaaagacaaagtataaaaagatagcaagcaatttaaaaaggaggaagtatcatggacacatcaacatacgaaattctgaaggaatgtaattctggatgccggatggcactgaatagtatcgagcagttggcggtatatctgaaaagtcaggagcttcaggacttgttctgtaaatataaagaagactatgaaaaaatggagaaggaatcaataagattgtcagaaggaaaaatgcaggaggagaagctgtcagaaaaggcagcagagacatttgcctggatcagtgctgaagtaaagatgatgctcaatgatgacagttcgaagattgcggaaatgatgatcgacggggcaaatatgggaataaaatccattacagagaaattaaatcgttatccggaagcggaaaaagaaagcatttcacttgcaaagaaatttgaaaagacatgtgaaaaactgattcaggatatgaagaaatatttgtaaaatattatgattttttcgtggaatatgcagccaaaaatattagaaaacgaaaaaataactctttacattttccttgattttggatacattattgttataaggttttaaatcaaggggaaaattatgaaagatatatcagaaaaaagactgagcgactatatggcggaacagatcgctgatgaaatattgtccggaagaattcccggaggaagtcagttaaaacaagaagaactggcagaagcgtttgaagcttccagaattccaatccgggaagctttccagatcctggaaaatcaggggttaattatccgccttgcaaccagaagaattactgtgacagaattggataaagaacagatatgtctgatctacagtatgatttcggagatgacaaagaaggcattgaacagtctgaaacatagtggaaagactgcgcagttggaagagttgcttatgacatcgggattgtcaggagaggtacagcctgcagaagccatgtgtgatctggtggaaaatgagtatatcaaaagacttttaagaaatgccagtgacagctatatccgttttgcactatcaacgggacattatgcagataagataaaagaagaaaaggataagatgacagaacttttagaaaatggggaactgaagaaagtagaaaaatctctggatgtatattttaaattgcttgcaagagcggtcaatgaagagagagggatgaatgaatgaatggattaaaaccaattaagatgccgtcggccaaggaaaaggtagcggcagaacttaggaaggcaatcttgtccaggcagatgaaagaaggagaagtcctttcactggaaagtgtagccacacagttaaatgtatcggcgatgccggtaagagaggcatttcagatacttgcaagagatgggttaatacagttgcgcaagaacaaaggagctgtagtacttggaattacggaaacttatattaaagaacattatcaacttcgtgcaattttggaaagtgcggcagcattgcttgcagcagagccggagacggacatatcggagatagaatccgtgtacgaagaagcagaagaggctctgaaggaaggcaatttaaagcaatatacagatctgaaccgtgcatttcatcatgagatctggtctgcagcaggtaaccagaagatgaaaaatatgatttctgaattatggaatggtctgtctatgggcagcatggtatcagaagaggattatgcgaaagtgtcgattaaagaacatgaaaggatatggagagcaatcaaggctcatgatcagaaggaagcacagatggcgatgtatgatcatattatgcggagccgggatgatatgcttacatattataaataattagtgcgttgttatttacctttgtggtgaataacaatgcactttttttgtctaagtatgcaagaaaagttgcctgtggcaagtcctttcaatacaaaaaacgctgaatattgtgattttgaacaaaagacgatatacagttttataacatatgccaaaatctataaatacctattgacatttttatcattaaggagtattttataatcaagatttggatacaaaatcaaatatcagacatcaaacgaaaacgtatccgagaaaatcgaacgaaataattacaaggaggtaatgaagatgagtcagataacaattacattactgtttctggcattcgcaatcatcatgttcatgcttgaaaagattccacttggggtaacatcgatgattgtctgtgtaggactggtagtcacaggagttttggactggcaggttgcattctcgggattcatcgacagcaatgtaatcttgtttgttgcaatgttcattgtcggtggggcactttttgagacggggatggccaacaagatcggaggagtggttacacatttcgccaagacagagaggcagctgatcgttgcgatcatggtgatcgttggagcgatgagcggtttcctttccaacacaggaacagccgcaatcctgattccggtagtcatcggtatcgccgcaaaatcaggatattcaagatcaagactgttaatgccgctggtatttgcagcagccatgggaggtaacctttcactgatcggtgcacctggtaacatgatcgcacagtcatctatggagaagatcggattgaaattcggattcttcgattatgcgaaagtaggacttccgattttgatcgtaggaattattttcttcgcactgtttggatacaaatttctgccggataaagtggacacaagcagtgagggaatcttcgatgagacaaaagatttcagcaatgttccaaagtggaaacagaacctttcactgatcatcctgttattaacacttttgggaatgatctttgaagagcagattggtattaagttatgtgtcataggatgcgtgggagcgcttgcactgatcgttacaggcgttatcagtgagaaagacgcgcttctttccatcgacttgaagacgatcttcttattcggaggtacgctttcccttgcgtctgcactggaagcaaccggtgccggagaactgatcgcagataaagtaatcggaatgctgggagataacccttcaccatacatattaacatttgtaatcttcatgctctgctgtatcatgacaaactttatgtcaaacacagcaacgacagcactgatggctccgatcggagtatccatcgcacagggcatgggtgcagatccaagtgccgtactgatggcatgtgtaatcggaggctcctgtgcatttgcaacaccaatcggaatgccggccaacaccatggtagtaacggcaggaggatatacgttcaaggattatgcgaaagcaggtattcctatgatcgtagtagcaaccatagtaagtatgatcttgcttccaatcttctatccattcttcccataaacataaggaagtatttgacctctaatctccataaaaacggaagatgtaagcagacatacctctcatgacagtttgtgataaaagttttcgctgtctttcatcacaatactgttgtgggaatatagataggaactaaaaatttttaatagaatttcaaggaggatatgaaaatgtctaaagaacaacaggtaacacaacttacagattatatggcaaaatttattgcacatatcgcaaagaaactgccggatgatgtcattgaaaaattaacagagctgcgtgagaaagaagacagcccgctttcaaaggtaatttatgacaccatgttcaagaaccaggaacttgctgtaaaactgaacagaccaagctgtcaggatacaggtgtattacagttctgggtaaaatgtggaacaaaattcccacttatcgacgaactggaaggacttctgaaagacgctgttgtgaaagcaacatttgaagcacctctccgtcacaacagtgtagagacatttgatgaatacaacacaggaaagaacgtaggaaaaggaacaccgactgtattctgggatatcgttccaaactcagacaaatgtgagatctatacatacatggcagggggcggatgtactcttcctggaaaagctatggttctgatgccgggtgaaggatacgaaggagttacaaagttcgttatggacgttatgacaacatacggattgaatgcctgccctccgcttctcgttggtgtaggtgtggcaacatctgttgagacggcagcacttctttctaagaaagcactgatgcgtccgatcggatcacacaatgagaacgaaagagcagctaagatggagactcttctcgaagacggaatcaatgcaatcggccttggaccacagggtatgggcggaaaatattctgtaatgggcgttaatattgagaacacagcacgtcatccgtctacaatcggtgtagctgttaacgtaggatgctggagccacagaagaggacatattgtatttgataaggacctgaactacacaatcacaacacatacgggggtagaattataatggtagaagtaaagaacggtaaaaaaatcttaacaacacctatttcagcagaagacttaaaagatatcaagatcggtgacatcgtatatctgaacggaagcatgacaacatgtcgtgacgttgcacaccgccgtctggtagaagaaggaagagaacttcctgtagatgtaagaaacaacgcaatctttcatgcaggaccgatcatccgtccactggaaaatgacaaattcgaaatggtatctgtaggaccgacaacaagtatgagaatggaaaaattcgagtacgaattcgtaaaagagactggtgtacgtgtgatcatcggtaaaggtggtatgaaagaaaatacagagcgtgcatgtaaagaattcggagcaatccactgcgtattccctgcaggtaacgctgtagtagctgctacagaagtagaagagatcgtaagagctgagtggagagatctcggaatgccagagacactctggaactgccgcgtaaaagaattcggaccactgattgtttctatcgatgcaaacggagacaacctctttgaagaaagaaagattgaatacaataagaagaaagatgctgctacagaagagatttgtaagcatgtaagctttattaaataattaggataataattacagtaaatccttgagaacccttttatactaatgtaagttatgcagttttcccccgggcgattcctcctaaagagcccgggggatttttataccaaactaaaaatgttctgtcctctaacaaaaattatgtggtataatgctcaaagttgaattgattttgtataaaaactggaggaagaatcaatgttatatacaatcccggattattaccatgaattttcctgtattgcaggcgaatgtgaagatacatgctgcgccggctggcagattgtggcggacgaagcagcgttgaaaaaatataagaaagtaaccggatcatttagaaaaagattaagaaagtccattaactggaaagaaggaacctttaagcaggacaggaataagcgctgtgcctttttaaatgatgaaaatctttgtgatatgtatacagcactcggtgaaaaaagtctgtgccggacttgtaaaatgtatccaagacacgtagaagaatttgaagatgtccgagagatgacgttgtctgtatcctgtccggaggtggcaagaattctgcttggtaaaaaggaaccggtgcgctttctgacatatgaaagcaacaaggaagaagaatatgatgattttgatccattcttgtattcaaaattggtagatgcaagaaaagtgatgatcaatatccttcaggacagaagtaagagactggatctgcgggttggtctggtgctggcgatcgcacatgacttgcaggtgcggatcaaaagagaagatatcttttccattgatgatgtatttgaaaaatatcagacggagaaggcggttcaattcgttgaagcaaaattatcagaagatgagaactatgcatttattaagaaaatgttccggaatcagtatctgatggaacgcttaagggatgactgggaaccgcatcttcttgaggcagaaagtttactttacggagatattggttgcagcgacagtgaagaacaatgtacaaagtacaaagaacagtatacaaagaacaaacgagaatttcacgaatggctgaatacatatatgccagattatgagatccagtatgagcagttactggtgtactttatcagcacttatttctgtggtgcagtgtatgacggggaagcttatgtaaaggtacagatggcggttgtcagtgtacttttgatccacgaatttctgctggcacagtggctgaagaatgagaagacactggagatggaggatgtgatagataccgtatatcgttattccagagaactggagcattccgatccgaatctgaacctgatggaaaagctgatgaggagagatctgttatcctggtttaagaaagaaaatgacggtgataaggagatggacaggcattaaaattgaaactacagttgcaaaataccatacaggtatgttataacttttagaagggaatgaagttctcccttagtgatcatactagaaccgcttataaagctgatgacttctgcgaataatgacgcagaaagtctcagctttttctgcgtttatagattgctatgcgattgaaagaaactgccagtggcagattctgtagataaggaggaatataaaatgttactaagcgttgcgctgatcctgctctgtggtatggggatgagctggatctgtaaaaaattaaaactgccggggcttctgggaatgcttctcaccggtatcgttctgggaccgtatgtgctgaatcttctggatgaaaatctgttaaatatttcatcggaacttaggaagatggcactgatcattattctgatgagggccggattagggcttgacatttccggtttgaaaaaaatcgggcgtccggcggtaatgatgtgctttgtaccggcgagttttgagctgttgggaatgttagtgctagcaccaaggttactgggactttctgtgctggaagcggcaatattaggatctgtacttgcggcggtttcaccggcggttgtcgtgccgcgtatggtaagattgatggaagaaggctatggaacggaaaaaggaatcccacagttgattcttgcgggcgcttcggtagatgatgtatatgtcatcgtattatttacgaccttttcagggattatgcagggaaaaagcgtatcggttatgagtttcctgaatattccgatatctattatcctgggaatgatcattggattacttgccggatggcttcttgcacggtattttgagaaagtacatatccgggataccgtaaaggtattaatcttactcagtatttcatttttactggtagtggcagaagatcatatgacaactgcaattacgttctcggcgttaattgcagtgatgtttctgggagtgggcttacagaaatacagggaagtggctgcaaaaaggattgcagtaaaatgtggaaagatgtgggtggcagcagaggtattcttattcgtactggttggtgcgactgtaaatatcggatatctatctcatgtaggactcaaggcagtcgttttaatctgtggcgcactgatcttccgaatgacaggggtctttgtatgtctgcttggaacggatatgaatggaaaagaaaagttatttacgatgatggcatacacaccgaaagcaaccgtacaggctgcaatcggaggaattcctctggcgcttggatttgcctgtggcgatgtggttctgacggtagcagtgcttgcaattgtactgactgcaccgcttggagcatttgcgattgatagcagttacaaaaaatttctggcaaaaactaagtgattccattgcaatgtattctcagtataaaataaagtagatccaatatctgattgacaaatggcagttctgtgatatcatataaaacatataggaaaagaaagaaaactatgttcatataataaaggaacacaaaaataacatgaaataaacggaggactgccatatgacaagagaagaagcatgggaattattaaccgaatataaccaggatgaatttcatctcctgcatgcacagacagtagagaatacgatgcgttattttgcaagagagctcgggtttgcggatgaggaagatttctggggaatcgtaggacttttacacgatctggattttgaaaaatatccggaagaacactgtatcaaatcgcaggagatcatgaaagaacgaggaattgatgagaagatcatccatgcaacggcgagtcacggctatgcgattacagtggatatcaaaccggagcacgagatggaaaaaatattgtatgcggttgacgaactgacgggtctgatcggagctgttgtattgatgcgtccgtcaaaaagtgtacaggatctgacattaaagtctgtaaagaaaaaatacaagagcaagaatttcgcagcaggatgttccagagaagtcatcgaacgcggagcggatatgcttggatggacactggaagatctgattcagagaacaattgatgctttgaagacattccaggattaaaaaaggcgaaaaaggataacggacgaatggttcggaggattggcatttgtcaaaaaatgtgatatcatagtaattaagtaggagatgaaccgggagaagagacccggatgaaaggtgaagtactatgaagatatcaacaaagggcagatatgcactgagaattatgattgatctggcagagaatgcaaatggggaatatattcgtctgaaagacatatcggcaagacagggaattacattaaaatatatggaacagattatgccgatgctgacaaaggccggatatgtaagaagttatcgtggcaataacggtggttatatgctggcgaaagagccggaagaatatacagccggagatattatccgtacaacggaaggaagccttgcgccgattgcgtgtctggatgacgtgccgaatcgctgcgagagacaggatcagtgttccacacttgagttctgggaaggacttaagaaagtaatcgaccagtatgtggatagtgtgacacttgcagatttggtaaataatcatgaagagaagtgcggcaagctggatctgtaaatgtaaatgaataaaaaacaagaaaatgtacagcaggcaaaagtctgctgtattttttattttataggaaagttcgattttgggcgaaccattgaacgaaaatagcccgcacagaggcgggcacacagatagaacgacaccgatttagaagatgtaaaaaccttctacaccagcctcgtcatcaaacagattatcttcatttaagaaataatccatatccagaagatcatcttcgctcatgttgcgaatgtccatagatgtcattccttcaggtggattatttatatttttttgcgtaattcctcaatgttagatttcatggtaatgttcctcctttagaggattataacacagataatcgaaaaagaattatgcagaagaacgctttccacgagatttggacatggatttctcgtaaagttcttggagggatacgcgttggtggttgtaatagagttctaaaaattccatttgatagttgcattcagggtatttcaaagggtcgtaaccaaaggaagaaaggatagcagttcgccattggttgaaacttcgatagatgcgacggcatctttattaaattcaaacacatcttcctttcttcggttaccttgtgtaataaccggatttaattttgctatcagttcataaccacctttttttgccgcctcgatatttgtcttttcagaataagccatatctccaatgactgattcaatctgtatcccagcagctttacttttttgtacaagttttggcagttctttgccatctattttttcgccgctggtgattgtggcagctgtgatgatccgttcttctgtcattgctatgtgtgttttacatccccaaaatgaagtatcggctgtcttatgaccagtttttgcatcttcatcctttgaagtttctaaatgttccatgtcatcagtgacagattcttctagtagattttaatttttcctgcacttttggataactgcaaatttcttcatttccttttataacatcaataagctgtttacagtattttagttctttttctaaagaatcatctgtgtttttatcaggaaatttttctttcattgtttcatcaatttcatagatgctacggcgcagtttttttgattgttcctggagtacttgacgggggagtcttttgattgtattttgattttgtatgcgttgcatccataataatgtattttgacttaataattcctttttctaatgttaactgaactgttttggcaatcagcatatccaaaagattcatatcctttaaacgtaacttccgaaattttgtcaatgaacttggatttataacttcatcttctggagccatgtccaaaaaatatttaaaagacatatcgtatttagaacgttcaaccagatcaatatctgataaatcgtaaattgatttcaaaagaagatatttaaatattcggataggtggaactgcatttcctccgttatccagacaataattagcaagcaatgcatcataaataaagctaaaatcaaccaattcttttatctgccggagaagattatcttttgggattattaattcatatatttccatgtagagatttagcaccaatttctgctgttgttcgattataaaaacaccgcctatatttgatagatacattgtaccaaatatagaacggtataatctactttttcagtgccatcgaacgaggggcaggggagttgaataggcgtagactatttttgttgactattgtgcaaagaaaaagtttgtacgtttgatattctttaattcatctgaagaaatgtgaagagcatttttcaattcatcattaagcggtagcggattttcgctggcaatcactttcatggcgatactctgataaaagtacgtaatcgtggaaatcagaccgacaacgtgcatggaattaatgccgattgacggaagacgcaacgtcagaatgtcaaaaggcggctttgtatttacaaggataaaaaccgtacatgtatcgctgtaggtaatatcgccttcgtaaatataattcgcttcgtagtagttggatatgtcatcgacatcgtaatacatcgtagcagttaatgacaaattcttattttccagaactgccttctgcaagcagttcttttctccgttaaaccaataaagataaagtttgtcagaaaaataattctggtaccttgcaatttcggctgcgcttttatcggttgaagttatggggagcagagaggctatgtcgatattcagaatctgacaaatgtctaccagagtgtcaatacttatgagaacctctcctttttcgtatttggaaatcgtggcaacgcttttgttcaattttttggaaagatcacttaaggtcatgtgtttggtccggcgtcttgcccgaagctttttgccaagtgttgtgtaaaaatcgcaagaatccatattatccctccttgatgttttttgataatgttagttgataaaaactaaaaagtataaaaaaattctaacatattctgataaaaaatgctactaggcaaaatttttgttagttttgaaaggtaaatttatttcatttttcttcaggtaataatattcataaagctgctttatgaaatctgctatctgctccatcagataatggttcttttgtgcctgttcattccagctgcatgcatgctctatattcccccgccaatgcttctgccggttgaatccctgattttctatcttccatctgtttcttcccgcatttactatttttctggcattgttttttgtgattgtaatgtctgcaatccatgcaaactctgttgtttcttttttttcatctggtttaatcttcttttctgtataatatgtcagatttacatctgtattctgaaacataatctgattctgatattctatttctgaacctatcttttctttttccggcaatgactgatattctttggctatggatgatgcacttccctttttataacggatgatataattccagctgttatctgtgcaggtctgtataactttctgactgacatacaacccatctgccgttataatgatcggaagtctcggaaactgtttcttaatcttttctgcaactctgataaatgctttactttcacagtcctgttttatttttttttcactctgattgatatattcctcagaattctggatcgcttcagatgctatactgcatacaaggttattccccagataaagttttgcttcgagcacgcttctgtgatacttcgtaaattcatctgcttctccacggttatagcagcgactcaggtaatattcattctttttctgatatccctcatccagttctgtggcgtcaataatgatctgccaccttttcaacaccctggcatcatcaaatgtttttctacggatcatagaataagcaatatctttctgtattttttccagttcctctgggttcagtcttgccaaaaattcattctctataacaccatgaggaagatactccttcttttcttcactcatgaatgagtagagattttctacaactgcatcatcattaaatttcagtgtcatttcctgcatacttgaaattccgcttatgcatttgtagtacatggttccaagcataaccctcactggatattcaatataactttgatttcgcggatcattcacctcagcaaatttggcaaataactctgggtaatatttattttgaatcttattgtattcaacaactggattcttttcaggtcttcttttggctctttcctgttctctgttcatttttcttcctttgcgacaaagttttttcttttattttactccatcgtaaaggaagatgctttaaattcaataaatttaatgcgaattatttttatctattttcatacaatttttgtaatatgaaaaaaatgtatgaaaatagataaaaaataggaaaagtaatagacagatgctgcggtttctaaatagaattttcgtataatgaaaataatagtaaaaattattgtcgaatgaagaaactagataaatttgtgaatagattatcaatgtgcaataattattaatgaaaagagtactcataaaacgttataaagctgaatggaggcgaggagattatgtctaaggaagcaaaagtaggatacaagaagaatataggaaccattcttttgttatcttttgccggctcaattatttatggattgccatattttcgatcatattactatgatacgtatcaggcaatgtatcacttgactaatacgcagatgggacttttaggaagtgcttacggcgtgttgggtgtattttcttatattatcggtggagtattggccgataaaatcaaagcgaaaaaactgcttattttttcgatgattgcaactggtttgggtggattgcttcatttgtttgttaataatttctatgcattggtagtgatctatggattatggggtgttacatctcttttgactttctggcctgcgcttatgaagattgtcagaatccaggcaactgaggaggaacaaagccgtgcttatggaacctttgaaggtgggcgaggtgtattcaatgcggcacatcttgcagtggcaacagcgatttttggaatttttcagagaaaggcaatgccgactctcggaattaaaggaattatctggttctattcgttggcaccgttgattgtaggtattatctttattttcctgttgaaggagcctgagaccgttaaagaagacggaacttcaagcactgtttcatttaaagatattatcagagtgttaaagatgccggttatgtggttgattattatcatgatgtacacaagttatacttttaatatgtcatcatattattttactccttatgcaagtaatatcatcggagttacagccgtgatcgcagcaatcttaacggttatgtctcagtacatccgtccgtttgcggcaacacttggtggattttccggagataaattcggaagaagccatacaatgattgttggttatattttgatgatcgccggtgtggttatcatggacgttacaggcaaaatggcttcggatagcagaatgatattggttgtggcggcttgtgtgctggtatatgcaggtatgtttataaactttggtctgtacttctcgtttatttcagaaggtggtattccggtggaattaggaggagttgcaattggtatggcgtccacatttggatatttgccggaagttttgagttatacaatcgcaggtaaattgttagatacttatccgggatatcagggatatcacctgaatttcctgtatatgatcgcgatgggcgtgattggattaatcgttgcgattatctggacaaaaaagtatggaaagaaaaaagcagatgctacagaagcataataaaaaagaaggagggttaaattatggctaaagtagaatcaacagtaaaaagagtaatggcgcgagatgaatttccttacgagtgggatgtgatcgagaacgaatggattacaatgtctgatggctgccgcctttcggcgcgtgtttggcatcctaagacagataaaccggttcctacaatatttgagacacagccgtatcgtaagagagatggaatgcgtggaagagatgaaccgatgtatggtttctttgcaggtatgggatataacgtagttcgcgtagatatgcgtggagcaggagagtctgaccagtgtttctatgatgaatacctgaaacaggaacaggatgatgcggtagaatgcatcgaatggattgccgagcagccatggtgtgacggaaatgtcggaatgatgggaaaatcatggagtgggtttaactcattgcaggttgcggcaagacagccaaaaggattaagagcgatcatctgtgtaggatttgttgatgacagatatacacaggatattcattataaaggtggatgcctgttgaatgataacttctggtggggcaatattatgctggcatacatgtgccgcgcgattgattcggagatcaaaccggatacatggaaagaagagtctgttaaacgtttggaggaaatgccactttggccggctaactggatggaacatcagacaagagatgattactggaaacacggctctgtaagtgtgaattatgacgatattaaagttcctgtatttgcactggatggatgggctgattcttatacaaacagtgtattaactttgatggaaggattaagtgttccgagaaaagcactgatcggaccttgggcacatgtatttgctcatgacggaatgcctcagccggcaattgatttccttggtgaagctacaaaatggtgggataaatggctgaaaggtgttgataacgacacattagactgcccgatggtacaggtgtggttggaagacagcatggaaccagaaactgtacatccgcttagtgatggacgctgggttgcattggacggatggccgtcaaaagatgttgctatgaaaacactttctatgacatacggacatcttcaggatgaagcaaatacaaagaaagaaatcgtagatctttgcacacttccaaatcacggactcctggcaaatgagtggatgggagcaggtgttctcggggagtctccggcagacatgagagtagatgatggaatggcaatggtatttgattcggatatattagaggaagaagtagagattcttggatatccggaatttgaggtagagtttacctgcgataagccaaatgcatttatgtatgctcagctgagtgatatccatccggatggagcttcaacaagagtttcttatggacttatgaatctgacgcatttagaggggcatgataaggtggtataccttgaagaaggtaagacatataaagcaaaagtacagttggatgtgtgtggacataacttcccgaaaggacacagaatcagactttctattgcaaactcattctggccaatgatctggccatcaccggagcttgcaacattaaaactggatctgtctactgctaaatttgcattaccgatgttctcaggaaaagatgcggaaggtccgaatatggaagccagatgtgcgccgcttactccgatgacaacattatcacctggtcgtgtagaccgtacaattgagtatgatctgctcacggattcatggacatctattacaaacggtgttggtggagtgtttggagagggtatctatcgctttgatgatattggaacggtagtagaacataacctcaagagagaactgacgatgagcaacaaagatccgttgtcagccaaatatactattacgcagaagatgaagaacggccgtgatggatggctgacagattgtgatatcgttgttactcagactgctgataaagataacttctatattaccggacacatggatgcatcaattaatgatgaacatgtattccacagagattatgactacaaagtaaagagaaatggaatttaaaaaggggcgaggcgattgaaagaaaaaagtattacattctgggaacttgtgcttatgaatgtatctgccctttatggaatccgctggattgcaaaatcaacctcagacagttttggcctggggttgggagcaatcccgatgtggatcatatttatgctgatattctttgtgccgcaggcgctgatgtgtgcggaactggcaacagcatatcctacagatggaggtctgaatgactgggttaaaattgcattcggaacaaaatatggatttttagtatcctggatgcattggacggcacttattttctggtatgcatcttttctgacatttttctcaatcaattttacttacatgattgggaaaccagaacttgcagataacaaaatattagtattgattatgtcgttggttgttttctgggcgttgtcgtttgcgagtatgcgtggtatgaaatttggaaaatactttaccagtgtaggtgcgctgggttcggtggtaccgacggtgtgtctgattggtatggcaattctggcagtggtagtgttcaaaaaggcaccaagtgcatctgagtatacgatagcaacattgacccctaagctaaatatgaattcgctggttgcaatttcgggaattacatttgcgtatacaggagctgaatttacagcaaacttcgcttctgaaatgaaaaatcctcagaaagattatccaagagcaatcatgattgctgccggaacaatctgcgtattatatgtgattggttcggtatgtatgacaatgctgatgccgacgtcagaaatctttgcgtatacagggactttggatgcattagtaattgcctgcaatctcctggaagttcctcaattttttgttcagatcgtagcatttggaattactttgtcgatatttggagcggtagtgctgtatattgcgcaaccgacaaagatgttgtttggatattctgaaccgggaatctttccggagaagattacgaagaaaaatgagcatgacattccggagaaggcgattttatttcaggcgatacttgtttctctgctgcttgcaggcgtggcagttttcccggcagttgaaacgatttacaatgtattaattactatgaccgcgttgacatcgttgtttccgtatgttcttttgtttgcggcatatattaaaattaaacggaaaaaggttgataaacctgggttgtatcagatgacaaaaaataaaaagtggggatgctttcttgggtatatggaattggtaatctgcgtgattgcgattgtgtgctcggcacttccagttatgacaacttttaaagaaaatgtagtctatgaagttgaaatgataggcggaggtttattagttatcgtgtctggattgtggttgtggaaacgttcgggcttgaaaaataagacatttgaaatagaatgattttaattaaagagaaggctaaaaaggatcttttgaaaacgttgggtttcaaaaggtcttttttatgcaaaattggcatgcacaaaaacataaaaactggctgtttaaaaaataccagatgagcgtatgataggactcaaagaaaattcacagaaaacagataggaaaggtacaggaattatgaaagagaacagatatgaattaaataagcagctggcacagatgttaaaaggcggagttatcatggatgtaacaactccggaacaggcaaagatcgcagaagaagcaggtgcatgtgcagtcatggccctggaaagaattccggcagatatccgcgcagcaggcggcgtatcccgtatgagcgatccgaagatgatccgtggcattcaggaagcagtatccataccggttatggcaaaatgcagaatcggacattttgtagaagcgcagattctggaagcaattgagattgattatattgatgaaagcgaagtactttcaccggccgatgacatttaccatattaataaaaaagagttcaaagtaccattcgtatgtggtgcaagagatctcggtgaggcactccgccgtatcgcagagggtgcatccatgatccgtacaaaaggcgagccgggaaccggagatgttgtacaggcagtacgtcatatgagagccatgaatgcggagatccgtcgcatccagaacttaagagcagacgaattattcgaagcagcaaaactgttacaggttccggtcgatctggtagaatatgttcatgaaaatggaaaacttccggtcgtaaactttgcggcaggcggagttgcgacaccggcagatgcggcactgatgatgcagcttggagcagaaggtgtattcgtaggttccggaatcttcaaatctggtaatcctgcaaagcgtgcggcttctattgtgaaagcagttacgaactacacagatgccaaactgatcgctgaactttcaacagatcttggcgaagcaatggtgggaatcaacgaacaggaaattgaattattaatggcagaaagaggaaaataagatgacgattgcaatcttggcaatgcaaggagcattcttagagcatggacagatgctggaccgcctgggcgtggaacatttcgaaatccgtaaaaaagaagatctggatcgttcttttgacggactgatccttccgggcggagaaagtaccgttatgagaaagcttctgatcgagctgaacatttacgatatattgaaaaagaaaatcgaggacggacttccggtattcggaacctgtgccggactaatccttttggcagagcaggtagaagatggtgttccatgctttggcacaatgaacattttggcaaagcggaatgcatatggaagacagcttggaagcttttatatagaagatgagatgaaagaaattggaaagattccaatgacattcatccgtgcaccgtatattgacgatgtctacggagaggcagagatacttgccgtagtagatggaaaagttgtggccgcaagacagggcagccagcttgcaactgcgtttcatccggaactgaatgatgatacaagtgtgcatgcatattttgtagaaatgataaaaggaagcaaggcacaggctgtatagaaacgtcatttataatatgaagacggaacgacattttatgtaataggatagtactgtgtttttgaaaaggagatgtaaaaaactcgattgagtttttttacatccccttttttgcgcttgttgttttcatttataagagaaaataatttaccacgttaaaattgtacaaaaataaaaacaaataaaatccacaaaacatagttgacaaataggaaatatatgaatataatacaaaacatatcaaacagataggaaaactaaaatacaaaaaaggagaacaaagcgatggtaagaagatatgtagaaacaagcaaaaagaacatgatgtgttgttgctgtatgatgtcgatgatggatacagcttgttaatcatgcatatcatgttacctgagataagatagagataagaagaagcgggtacacgatatcaggatgtatccgcttttattatatccagataggcggacacgatgaaaggagttcgaaaatggcagtaaaactgattgatgaattacaaaaagaaataaaagcggccggcgaagcagttaagcaggaagcgtatgaaaaagcatatgatcatgtatttcagatcctcgataatctggaaaagttgttgaatgacaacagatacctggaaggaaatgagattacagaggaagacaagcgattatacgacatcttgatccggttcgatgcagtctattatttcaaacagagactgaatagaaaggcattgagggattatgacaacctttggaattacgcaaaagaattatacagcattccggagtataaagaatttgcagatttcgaaaagatcaaacaagaagaacttctcggaaccaaagaagaaaatccatatcagatcgtaggacttggaccggatgaaagttactggaatgaaccgaacaacagagcagagaaatttgcttagaatatacagtattgataagaaaggagaacggcatggcaaatatagcagatgacattacagaactggttggaaatacaccacttctcagattacacaaatttgaaaaagaagcaggatttgaaggaaagatccttgcaaagctggaagtgttcaatccgacaggcagtgtgaaagacagaattgcaaagaatatgatcgaacaggctgagagggatggaagattaaaaccgggcggaacgatcattgaagccacaagtggtaatacaggaatcggtcttgcggcaattgcagcagcgaaaggatatcaggcgatcatcgttatgccggactctatgagtaaagaacgaatccggatcctggaagcttacggagcaaaagtagttctgacaccgggcgaaaagaatatgggcggagcgaatgaaaaagcagccgaaatactggaacagacagaaaatgcgatcattacaggacagggcggtaatccatccaatccggaagcacattatcagacaaccggtccggagatatggaaagataccggtgaaaatgtggatatctttgttgcaacggtcggaaccggtggaacaatcagtggaaccgggaaattcttaaaagaaaaaaatccggatattcagatcattggtgtagaacctgccggatgcccggtactctccggcggagaggcaggaccacataagatacagggaatcggaggcggtgtgattgcaccggttacggatgtagaacttctggatgaggtaatcacggtgacagacgatgaggcttatgagacagtaagaaaagcagccagaaaagaaggaagctttatcggaatatccgcaggagcggcactctttgcagcaacagaagttgcaaaaagaccggaaaatcagggaaagacaattgtaacgatctttccggattcggcagacagatatctgtccacagatctgttcgaatgaaacagaataaggtaaagagaatcacagatatcaagaaagatgaaatgaaagtataaaaaagattcactaacattttatagaaaacagaagaaagacaaaaaaaggagacagtgacatggcagaatttgattatgaagtagtaaatggaagaaagataagagttcgtccggtagagacggtttcagaagtagatgagaacggatattttgtccgccagccgaatcatttcactgaaggattcggagaaggaaagaatccggtagaagcgggcagatacaggctggtgtgggcaaagctttgccactggtctaacagagcttctattgtaagagaacttcttggattagatgaagcgatcagcgtgaatatggtagatcatgcggagcacgaaaagaacctcggatgggaattcgtatatgacaaagataacgtagatccggttctggacatccagtttttaagtgaagcatattacaaagctgacgacgattatacaggaagaactaccgtacctgcactgattgatgtaaagacaggaaaagtagtaaataacgattatcatagactgaccaattattttgaagtggatttcaaaccattccataaaaagaatgcgccggatctttatccggaagaattaagaaaagacattgatgagatgaacgattggttattcgataacatcaacaacggagtatacaagacaaccttctgtagatcgaaagaagcttactgggatgcatacaattctttctacgcggcaattgatctactggaagaaagactggagaaccgaagattcttattcggagattatgtaacagacagtgatgtgagactttatgtaacacttgcaagactggatatccgttatacacatcagctcggacacaccaaacgtccactgttcacttacaagaacctgtgggcatatgcaagagacctgtatcagattccggcattcaagaacaatacatattttaaagattttgcaaatccggataacaagaaacagggaagaacattcgagtcattcaatgcaagattcttagatgagattgactttgatgcatactggggagcacctcataacagagcaagactcagcagcgatccgggtaataaattcagaacagaaaaacaggattaagaaaatatacagcagcgatatagaagaacaatacagaaaggcaggaatcgtaagatggcagaacatgaatattatgaagtaaacggaagacagatcagagtcagacctacagagtctggtcaggaaatagatgaatatggaaactttcacagacagccgaatcatttcacaaaaggattcggagaaggagaaaacccggtagaagcagacagatatatcttattctggggaaaaggatgcaactggtccaacagagcatcgatcgcaagagagttactcggacttgataaggtaatcaaagttgaaatcgtagactggggcgattatgaaaaaccacttggatgggaattcgtaaactcaccgaatcatattaacaaggagacgggagcacagttcttaagtgaattatattacaacgcagatgatgattatgaaggaagaactaccgtaccggcattggtagattacaaagagaaaaaggtagtaaataacgattaccaccatctgacgaatcatttcgagacagcatttaaaccatttcataaaaaaggcgcaccggacctttatccggaagaattaagagaagagatcgataagctgaatgtatggttattcgaaaatgtcaataatgccgtataccgcgcacagtttgcagaaagtttacaggcattcaaggacggatatgagacattcttcgcaggactggaagcaatggacaagcgtctggagaatcagagattcttatttggtgattacatcacagacagtgacatccgtctgtatacaacacttgcaagatttgactacagctattccagaaatatcggaccttgcgtacacagactggtagattacaagaacctgtggccatatgcaagagatctgtatcagatcccggcattcagacacaatacatatttcaaagatttcgcagcatctgaggatcttacgcatgcaccggaagattactgggagaatgtatattacgacattgttgtacaggagacggactgggatacaatctggagccagccaaccggaagagaagcactaagtaaggatccggctcataagtggaaagcagaaaaataggcagaaaacagatacaaaaaacaggaggaagaaccgatggaagcaatccgtgtaacagataaagaatgggagatcgcaggagtccattatgtgaggaccgaagctatgtgcaatggatttggtgtgtcactggagatggaattcggtgaagataaggcaggcgatgaatacatactggtgctggatggaatccatccggtatcgacctgcagactgcatcagctggatgaaaataccggaaagattgaaagagtcgcaacacttaagaaataccgcggacagcattatggagcagcggcaatcactgcggcagaagagtggtttgcagaacgcggtgtgaaaaagatctttatcaactccagaaccgaagcagttggattctatgaaaaacttggttatgtggcagatccaaagcagattacaggaaccggagcatttcagtgtatcatgacggaaaaacagctgtaacctgcagcgaacagaaaatacagatgaaaaacagagaaacgaacaaagtataaagagggagaatgtattatgaaaagaaataaactggtaagcatagcagcaatcattgtagcacttggagtattggcaaccggatgtgccggaggttccggatcttccaaaagtgacagcaaaagttctagcggaacgaagacggtaacagtaaaagcaggaaccggagcgaatgtaaagccttatacctatgtaggggatgacaatgagacaacaggatatgatgtcgaagtattaaaagaagtctttgaccgtttagacggatatgatcttcagattgaagtaacagatatcccttctgtattctccggagttacgagcggaacttatcagatcggagtcaataacttctcatacaatgaagaaagagcgaaatcttatctgtactcttatccatatgacaaaataggatatgtatttgtcaccaaaaaaggtgcaccggaagtaaagacatttgcagatgcagcaggaaaatcttttgaaggacagtctggtgtcagtgttacaacagcaatcgaaagctggaatgaaaagaatccggataagaaaatcgacattacttataccgatgcagatacagcgatcacattacagcatatcgaagatggaacaacagatcttgcaatcattgatgtcgcaatgtataacgcttatcagaaagaatataactatgatatcgttgcaaatcagatttccgatgatgatgcaaaagcaatcgctgacaacagctatgcatattacattttcccgaaagatcaggaagaactcagagacaaagtagacgagcagttaaaagaactgaaaaaggatggaacacttagcaaattaagccagaaatatttcggacaggatacagctccggaagatgatcagtttgaaaaaacaccaaactaacatcaatctggaatccagaaaggaagaatcagcatgagtaatttatttgatatcaagatggtatttacacagataccggatctgttaacctatctgccggtgacactggaactggcagtggtagccatgatcgtcagcctgatcttaggtctgatcctggcactgatcaagatgaagaagatcccggtgttaaaacagattgccaatctgtatatttcagtaatccgtggaactccggtactggtacagttgtatgtaacatactttggaatcccgatgatcttaaaagccatcaacctgaaatatggaacgaattataatgccaacggcgtggcaccgatcatctatgcatttatcgcactggcagttaatgaatcggcatacaacgcagaagtgatcagagcttcactggaatctgtaccgaagggacagatcgaggcagccaatgcacttggcatgacatatttccaggcattacgaagagtgattcttccggaagcaatcgtagttgcattaccttcacttggtaactcctttatcggactgatcaagggaacatcgcttgcattcgtctgtgcggttgtagagatgacggcagcaggaaagattattgcaggacgtacataccgttactttgaagtctatgtatctctggcaattatctactggattatcacgatcatcgtagagcagggaatcaaactgatcgagaagaagatccgcataccggagaatgcaccggcaatacagacagatgagggggcattgaaccaatgattgaagtgaaaaatatttccaaaaaattcaataataacgtggtcttaaacggcatcgacctgaacatcaacaaaggtgatgttgtagcgatcatcggaccatccggaaccggaaagtcaacattcttacgctgcctgaacaggttagagaagccggaaagcggaagcatcagcatcggagacctgagcgtagatctggcacgcagtgataaaaagtcactggtagagcttagaaaaaagaccagcatggtattccagggattcaatctcttttccaaaaagacagcattggaaaatgtaatggaaggcctgatcatcgtaaagaaaatggacaagaaaaaagcagaagagatcgcaagagaacagcttaagaacgtaggacttctggaatgggcgaatcattatccggcacatttatccggaggacaacagcagagagttgcgatcgcaagagcactcgcaatggagccggaactgttacttctcgatgagccgacatctgcactggatccggagcttgtaggagaagtactggatacgatcaagaaggcagcgaatgaaggatatacaatgcttttagtatctcatgagatgaactttgtaaagaatgttgcaacaagagttatcttccttgagaacggtaagatcatcgaggacggacctcctaaggaagtgttcaatcatccaaagagtgatcgtgtgagggagttctttgcgaagatcaaccgtatggtggaaccagaatattctatctagttacagaacctgctgcgggcaggttcttagtgtataagcaggagatttagaacatgagcatttggataaaaacagataaagaaaatgtagactgccggacggatatagattcggagacaatgaatacgagaggagagcaaaagaatgagaatatcatcagataaatggaccggaaaagaagtagataaaagtggaaaattcgtacggcagaagaaccggtttgatacaccattcggagaagaagaaggacaactcccggtagaagccggtagatacagacttctctgggcaccggtatgcccgtgggcgcacagaagtattatcgtgagaaaattactgggactggaggatgtgatcagtgtcggaaaagcagacccaaagcgtccgaatgtatcaagaagcgactgggcatttaccttggatgaaggtgacgtagatccggtacttggaattcattacatcagcgaagtatatctgaatgcagacccggattatcagggaagattcaccgtaccggcactggtagacttaaagaccaaaaaggttgtaaataacgattacttccatctgacactgtattttgagactgcatggaagaaatatcacaaaccgggagctccggatctttacccggaagaattgcgggaagagatagatgccctgaatgacatcatattcaaagaagtgaataacggagtgtacaaagcaggttttgcgagaaaccaggaggcatatgaggaagcttatcataccgtattcaaccgtctggactggttggaggaaagactggccgacagaagatatctgttcggagataagattacagaatcggatgtccggttatatgtaacactgacaagattcgatgtggcttatcataatatctttcgtgtgaataagaagcgtctgagagattatgataatctgtgggcttatgcaagagacctgtatcagacaccgggattcggggatacgacagattttgcggcaatcaaaaagcattatcacattgactgcaatcctggaaacatccatcagatcattgcaaagggaccggatgaagaagcgtggctgcttccacatgggagagagaagctttcagaaaaataaaatataagagattagaataataaaaaagctgtcgggttatgaaggtatgctaaccagacagctttttgtgatataaaagtgtacacgggaagataccgggatgtataatattttagagaaagtatttttcggagatacactagtattaaaatttcggaacatccagttttggaatgatttaataatcggaggagtgaaatatatgtatgagcaggattatataataagaatgaataatgaagttataagaacaatggtgaagttattattaaacaaggatacaggtgtatctgtaaatatttcagagggaacaattaaaagcgaaaacaaaaaaatgttagaagctgcaaacggacaaagtggtatagataacattaagaagatggaagaggagatattaacgcttgtagatgcggataaagaaggagctttagaaaaagcacttgtattctatggatatctaaatgaactgacggaagatgcattattgtcgaagaattatagtcacgaaaaaattaaaaaaggactgaagattattgcagagcattatggaatattaaatgttattgatttgatatacagataaaactgtaaaacatacttgacaaatatgacatagcggtaatataataaaaccaatccataaaacctatcgaaacaataggaaatataaggattggttttatttagtttaaagaacggaagggagcgtgcaggataatgacaaaagaaaagcgaatgtggggacgaatgcgatgttgttgcgcttgcgcgcatgaaaaataaaaattacaaaaacatactaaacatagttgacaaataggaattaaggtagtatagtaaattcatcaagaaaacataccgaaaaagtaggaaaggtaggaagcaaaatgtcaaagatttataaaggaacattaggactgatcggaaatacaccactggtggaagtagtaaacatagaaaaagaacttggtctggaagcaacacttcttgtaaagcttgagtacctcaacccggcaggaagcgtcaaagacagaattgcaaaagcaatgatcgaagatgcggaagaaaaaggaatcttaaaagaaggttctgtgatcattgaaccaacatccggtaatacaggaatcggtcttgcatctattgcagcagcaaaaggatacagaatcattcttacgatgccggagacgatgagtgtggaaagaagaaacatcctgaaagcttacggtgcagagatcgtacttaccgaaggagcaaaaggaatgaagggagccatcgcaaaggcagatgagcttgcaaaagagattccgaatagtttcgttcctggacagtttgtaaatcctgctaacccggcagcacataagaagacaacaggtcctgagatctggaacgatacagacggagcagtcgatatcgtgatcgcaggtgtcggaacaggcggaacactttccggaatcggtgcttacttaaaagagcagaaaccggaagttcagatcgtagcattggagccggcttcttcaccggtactttcagaaggaaaagcaggcccgcataagattcagggaatcggagcaggattcgttccagagacattggataccaagatctacgacgaaatctacaaagcagaagcagacgaagcatttgaaacggccaaacttcttgcaaagaaagagggagttctggtaggtatttcttcaggagcagcacttgcaggagccatcgaactggcaaaacgtccggagaacaaaggtaagacgatcgtagcattacttccggattcaggtgacagatattattcaacaccattatttacagaataaaaagatatagaattcgaaacagaacggacagtattaacaaataacgataaaattatgaagaaaaaggagatcaccccaatgagcgaaaaaatcacaagagagaatagagagttaaaatttgaaacattacagttacacgtaggacaggaaagtccggatccggttacagatgcaagagcagtgccgatctatcagacatcttcttatgtatttcgcaacagtgatcatgcagcagcacgttttggactggcagatgcaggtaacatttacggacgtcttacaaaccctacagaagacattttcgaaaaacgtattgcagcactggagggcggagttgcagcactggcagtagcatccggagcagcagcagtaacatatacgatcgagaatctcgcacagaacggagatcatatcgtagcagccaagaatatttacggtggatcttttaacctgttagagcacacacttccacagtatggaattacaaccacattcgttgacatcttcgattatgatgcagtagaagctgcaatccaggacaacacgaaagcactctatatcgagacacttggaaatccaaactcagacgttgtagatattgagaagattgcaaatatcgcacatgcgcataagattccgctcgttgtagataatacatttgcaacaccttaccttgtaagaccgatcgagtacggtgcagacattgttatccattcagcaacaaaattcatcggtggacacggaacaacaatcggcggcgtcatcgttgacagcggtaagttcgactgggaagcatcaggaaaattcgcttctcttacagagccaaacccgagctaccatggaatcagctttacaaaagcagtaggacctgcagcatttgttacaaagatccgtgcgatccttttaagagatacaggagcaaccatttctccaatccattcatttatcttcttacagggactcgagacattatcattacgtgtagagcgtcatgttgagaatgcactgaaagtagtagaatacctgaacaaccatccactggtagagaaggttaaccacccggctgtatctgatgatccggaacagcaggcattatataagaaatatttcccaaatggcggaggatctatcttcacatttgagatcaaaggtgacgcacagaaagcaaaagatttcatcgataatctggaactcttctcactgcttgctaacgttgcagatgtaaaatctctggttatccatccggcaacaacaacacacagccagtgcacggaagaagaattactggatcagggaatcaagcctaatacaatccgcctgtcaatcggaacagagcacattgatgacattatccaggatctggatgaggcattcaaagccgtagaataagaaataatgaaggagtgtggagatatatatgaaactttcaatgaaaagcagatatggtctgagagcgttgatcgacctgaccatcaattcaaaaactgaacaggtggcgctcaatagcattgcagagcggaacaagatatctccacagtatctggaacaggtatttgcaagtcttagaaaagcaggaatcgtaaagagtataaaaggctcccagggcggctatttcttaagccgtccgccacaggagattaccgtttcttctattatagaagctttggaaggtgactaccgcatcgaagatgaggaacttccgaaagaaggaaaatataccgggagtgtcaaagcaatccagaaactggtgatcgacagggtaaatgacagcgtgacagagatcctccagtcagtaaccttgcatgatctggagaaagagtatcaggaatacattgattatggacaggatatgtattatatataatatcagttcacacaacaaaacatactgtattagtgggaaaccactggtacagtattcttttttgtggtaaacttttctagcgtatatttgaaagataaatgtttttaaaacacatttcagttccttgacagacagggaaaaacgtcatataataccagataaataacaaaacctatctggttaataggaatagctgctgcatgaacagcaactcacaaagagaggttaaaagatatgaagacaatcacgatagaagagttattacaattagatcagaatacaatcacagtgctggacgtccgtcctgcagatgcatataccagaggctctgtaccgggagcggtcagcatcccgcttgcagaagtagaagaacgtatggaagaacttccgaaagaaaagccggtgtatgtattatgccataccggtgaatggagtgtcgatgctgtttatgaactggaagcagccggatatgatgcggtgaatattgaaggcggatatcgttcctttttaagaaagaaactaagtgagttcgtacaggatgaaaatactaccggagagaagcagaaagagattgaacgcagtatcatcaagaaattccgcaagggaatctggagaaagttcacgaaaggaatcagagaatacgatctgatccaggacggagataagattgcagtctgtatttccggtggaaaagattccatgctgatggcaaagctgtttcaggaactgttaaaacatggcaaagcgaattttgaattagtatttctggtaatgaatccgggatacaatgaagataactggaagatcattcaggataacgccaaagtacttggaattccgcttacggtatttgagacacagatatttgatacggtagcagatattgacaagaatccatgttacctttgcgcgagaatgagaagaggctatctatactctcacgcaaaagaactgggatgcaataagattgcgctaggacatcattttgacgatgtgattgagacgatccttatggggatgttctacggcggaaaggtggagacgatgatgccgaagctccatagccagaatttcgagggtatggagctgatcagaccaatgtatctgatcaaggaagatgacattatagcatggagggattacaatcagctcaacttcattcagtgcgcatgcagattcacagagaactgtgtatcctgtggcggcggaagaggttccaaacgtgacgagatgaaggagctgatcaaggaattcagaaaacagggagatattatcgaaaagaatattttccggagtgtacataatgtcaacttaagaacgattatcggataccacaaagatgacatggaatataatttcctggatgattacaatgaaagaggtaaataaataatgaattacggatttgagacacgatgtatacacggaaacggaacagatgaaaagacacattcttacggttcagtcgcagtaccgatctaccaggcagcgacatttgcccatcctggtattggacagtctaccggatatgactatacgagagagagcaacccgacaagaacagagcttgagcatacgatgtcggcactggaaggtgcggtagatactgtagcatgcgcaaacggtatggctgcggtaggtctttgtctggagttatttgaccgcggggatcatatcctttgtacagatgatctatatggcggttctgtcagaatgtttgaatctgtcggcgggaagagagggttggagttctcttatgtagatactgcagatgcagatcttgtagaagcaggtatccgggagaatacaaaagcactttatatcgagacaccgagtaacccgaccatgcgtgtcacagatctcagaaagatgaaagaaatcgcagataaacataatctgaagattattgttgacaatacatttctttcaccattatttcaaagaccgattgaactgggagcagatctggtcatccacagcgggacaaaattccttggtggacataatgacacactggcaggattcctgtgttcggcggatgaagagacagcgaagaagatccgttatatatataagacagtcggaagctgtcttgcaccatttgacagctatctgatcttgcgtggaattaagacattgtctgtaagattaagagcgcagcaggataatgcgataaagattgcgaactggttaaaaggacatgaaaaagtaaaacaggtctattatgtaggcttgaaagagcatccggggtatggagtaaatgcatcacaggcaagcggattcgggagtatgatttctttcaaagtagatagtgaagcaacagcaaggaaactcctggaaagtgtgaaactgatcgcttatgcagaaagtctcggaggcgtagagtcactgatcacttacccgatgcttcagacacatggagatctgccggtagaagtaagagagaaacttggaatcacagaagatttcttaagattgtcagttggaattgaaaatgcagatgatctaatcgcagatcttgagcaggcacttgcgtaggaggatgcacagatgaagttcgattttgataaagtagtggacagacatggaacaaaatgcctgaaatatgatttcgcaaaagaaagaggaagaagtgatgatatgcttccgctctgggtggcagatatggatttcccgacagcaccgggaatccagaaaggcttaagtgacgcagtcgcacacggaatctacggatacagcgaaggaaaagatgattacttccaggcagcagccggatggtatgagaagcatttcggatggaaagtagaaaaagaatggctgatcaagacaccgggcgtggtgttcgcacttgcgatggcagtgaaggcttacacaaaagaaggtgatgcagttcttctgcagcagccggtttactatccgttcagcgaagtgatcacagataaccacaggaggctgatcaatagtccgcttcagcagatagacggacattacgagattaatttcgaagaattcgagcagaagattgtcgaagaaaatgtaaaattattcctgatgtgcagtccgcacaatccggttggacgtgtgtggaaggagtgggaacttcgtaagataggagacatttgtctgaaacataacgtgctggtagtcagtgatgagatccacagtgattttacatatggagagaatatacatcatgtatttgcatccttagatgaaaaatacgctgcaatcactacaacgtgtaccgcaccaagtaagacatttaacattgccggacttcagatttccaatatatggatctcgaatccggagcttcgtgcgagattccgggcggaagtgacagcagccggttacagccaggtgaatctgatgggactggttgcatgtcaggcagcttatgagaccggtgaagagtggttaaaagaattgaaaatttatctggagggaaatctggattatgtccgtacatttttaaaagagagtcttccggagatcaaactgacagagccggaagggacttatcttttatggttggattttaagagtctcggcatgaaagaagagcagttaaaagatctggtggagaacaaagcaaaactctggcttgacagcggagcaatgtttggaccggacggagagggatttgagcgtataaatattgcatgtccacgagaaattttaaaacaggcattgacacaattggctgaatcggtgcatgataggtaagtgagaatacgttaaagaagggaatttgaccggaatagatggtaaaaatgtgcggatgtttgatctttattactgcgaccaggagtatgaacagaaagatatcatcagagtgttggatcagcctacatgttgtaaccgaatcgtaccgtggaagtattttaataagacggcacttaacatgtattcccttggaccgtacgatgggcgggaagctgttattttatttaatgaaaagacaagacttacggaagaagagaccatcgaatactttatttagaggtgaaagtcggaaatgaatgaagaaatcaaaaatgaaatccaaaaactgaaaaaggaaaaagatgctgtaattctggcacattattatgtagatggggaagtgcaggagattgcagactatgtaggagactcttattatcttgcagagattgcaaccaaagttccggagagcacgattgttttctgtggagtctctttcatgggagaaagtgcgaagatcctgaatccaaagaagagagtcgtaatggcagacggtcatgcagactgtccgatggcacacatggtagacgtagataagatcagggaagtgagaaatgaatacccggatgtatctgtagtttgttatgtgaactcaaccgcagagatcaaagcagagtcagacgtatgtgtaacatcgtcaaatgcactgaagatcgtgaagaatcttccgaataaagatatcttctttatcccggatgagaaccttggtcgtttcgtggcaagtcagcttccggagaagcacttcatctttaatgatggattctgccatgtacatacgagtatccacaaagaagaacttcagaaagccaaagaggcgcatccggaagcacttgtactgacacatccggaatgtacaggagatattctggaattatctgattttatcggaagtacttcgcagattatcgattatgctacaaaatcagaaaataacacatttatcatctgcacagagatgggagtattctatgaattgcatcagaaaaatccggagaagaaattctattctgtagggcacagacagttttgcccgaatatgaagatggtgcgtctggaaggtgtgaaggaagcgcttgagaccatgcagccggaggtcaatctggatgaagagatgcgtcagaaagcggcacttccactggagaagatgctgaagctggcagcgcagtaagccggggggacaggtaaagtggcttttttagtgtcccgggtggctctagtaaaaaaagaaaataattaagagaaagacttcgtatctgatgtaggatgcgaagtctttgttagtatatcaaagtatataagagaagttgttagtggaagattctgtagatgagttattaaaaccaataaaacaattaaaatgatggttttaaaagatgaaaaacaattattttaattgttttttgtttacaaataatagaggttgtgatttaataaagaaaaagacgggaatcataaaaccagaaggtgagattgtgaaagaaagactatttataacaccagaatatacaacagcaaaggaaatcaagaaaatccggaaagaattgcatctgacacaaaaagaatttgcagaatttatcaattgttcaaaaccgacagtagagcgttgggagagaagtgaagacgttatccgcggaccaattgttccatttcttaagatgctgcagaaatatccggaatatgaacaggaagtcaaagttccggaaaaagtgtggccgctcagaatctggtatatgtatgatcaggatgtatgtactttgattgatgtgaatgagcgggaacgaaaagtgaaaataaaaaattatacagataagattatgttccgtgcatttggggttatggaggaaccggattataatcagtatatagaatttctggaatccagatgtttcccggaaagcagagataagatgaaactgatactgaaagatctgggactgccattttacgatccgattatgattatagagaagacagaaggacggatggcggaggatgatttttggattcgtatagagaggtaaatgaatgatagaactttttgggcagaacatcaggacaaataggcgtcagtcgtcaaaagggaatcagttaaaatgggagaatgatgggatctggtacaaagccgattatacaggatatgaaggactggcagagtatatgatatcgcatcttctgaaaaaatctacgctggctgaacaagaatttgtatattatgacctggaagaaataaaatatggaatggtaatttataatggagcaaagagtaaaaattttctgaatgaagactggcagattataactttagagaggttgtttcataatttttttggagaaagtctgtataaaagcatgtatagaatacccgatcatgaggaaagattacgtttcttagtgcaacaggtggaacgaatgacgggacttcagaattttggagtatatatgaacaaactgctgacgatagatgcattttttctgaatgaagaccggcatatgcataacatagccgtcttgatgaatggaaaaggtgattatgcatactgcccgatctttgataatggagcagggcttttagcagatacaacgatggattatcctttggcgggagatatttacacacttatggagaaggttcaggccaaaacaatatgtaatgcattcgatgaacaattagatatttccgaatctttatataaaatgaatctaaagttccgttttacaaaaaaagacgtgacagaattgcttgaaaacgcagaaggctattcagatgagatacgaaaacgggtggaaacgattatatttgcacaaatgcggaaatatccttatttgttttcgaagacgtagagaaatataatggggaaagaacggtagaaataagtaattgttaaggaataaaggagaagataaaaattatgataaatgaaagaatcgaaatctggaaaaaagaagagtatcattatccggcagcacatggctttataccggtgatgttcagctatattcatgaggatgaaaagaagcatccggcaatgatcatcgcaccgggcggcgcataccgggaagtatccccatcggaagcgcacctgccggcaatggaattctatggtgcagggtacaatgtattcgttctggaatatacgattaatcagttagatgaagcaccgctgaagatgcagccgttacacgatatctcaagagcaatccgcatgattcgttcacgtgcagaggaattccatatcagaccagacagaattgcagcctgcggattctcagcaggagcacatctgtgtggaagcctttgtgtacataataaagatgtggaagatccggaagaagcataccagaacatatccaaccgcccagatgtggcgattctgtcttatccggtcatcacttcaggaaaatatgcacacagagattcatttgtcgcactgtttggaaaagagccgtcagagcaggagctggactatatgtcgctggaaaatcatgtgacaaaagatacaccgccatgtttcctgtggcagaccgtaacagatcagacagttccggtggagaacagttatctctttgcacaggcttgtgcacaggctggtgtaccatttgcacagcatgtattttcagaaggaatccatggactatctgtggcaaccgaagagtggttagagcagaatataggacaggaagaaggaaaaagatatacacaggaacaggtgaagatgcttgcagaggcaatcgaggccggcgagactccatttccaaaggaaaaaggagaggaacttctggtgaagttcggtatcggacgtaaaaagccggcaagatggacggaaaagcagaaagagggaatccgcaaaacgctgaaagaagtacagagctggacgcagcttgcagaagtgtggatggagaaatatctgaaagtggaatagaggagaataaagggtacaggcatttcaaaacagtgtggcaatcgaatctataaactggaaattacttgtagtactaaattgataattgtataatagtgagaaaagaaggaacaagaaaattgatataggataagagataaaatggagttatacaatggacgcccggaagacacatccggacgaaaagaaaaagaaataaaagtttacgatatactggacagtctgcatatcccctacatcagagcggatcacgaagcggtcatgacaatggaagcctgtgaagagattgataaagcgctgggaatggaaatctgtaagaatctgttcttatgtaaccggaagaaaacgtcatattatctgcttttgatgccaggaaacaaagcgctcaagacaaaagaactgtcacagcagatcccgactacgagattatcctttgcatcgggagaagacatggaaacatatctgaatgtaacgccgggctcagctactgtcatgggactgatctttgatccggagaataaagtgcagcttctggtggatgaggaacttctggaacaggaagaattcggatgtcatccatgtgtgaacacttccagtatcaagatgaagacagcggatgtatttgataaatttctgaaagaaatccatcacgattatattacggtgaagctttcggatggaaatgaacaggagtaataaaaatggataaacaagaactggcactggtggtcatcgaccgcctgaaaaaagaatacccggatgcgggatgcacgctggattatgacgatgcgtggaaactgctagtcagtgtacgtctggcagcacagtgcacggatgcgagagtcaatgtagtagtagaaggcttatatgcaaagtacccggatgtcaatgcactggcagaagccacaccggaagagatcgaagaaattgtaagaccatgcggactgggcaagagtaaagcgagggatatcagtgcatgtatgcgcatgctccgtgatgaatatgatggaaaagtcccggatgattttaataaattgttgaaacttccgggagtcggaagaaagagtgcgaacctgatcatgggggatgtgttcggcaaaccggcgattgttacggatacgcattgcatcagactctgtaaccggatcggtctggtagatggaatcaaggaaccgaagaaagtagagatggaactttggaagatcatcccgccggaagaaggcagtgatttctgccacaggctggtatatcacggaagagacgtctgtacagcgaggacgaagccgcattgtgagaaatgttgtctggcggatatctgttgtaaacagatttgagaaaatatagcatgccatgaaaataaggcttgcgtaagtaaaatgaaatttatataatagttctaaggacgagggagtagcatagaaagtgtgttactctctttttatatactaaagtatgcactagaagagaggaaatttgttatgtcggacgtagtaagtatattagacgaattacaaaacaaggcactaaaagacgaaaagttaaaacaacagcttctcgcaaccagaacagaagcagacccattgtctgcattctgcaggacctgccgggaacttggttatgaactatatgaaatggaattaattgcggcaggagaagaattccatgccgcaatgaaaagaagcaccaatggcggaggggagaactcgccgatgatcgaggctgaagatgatttctatgaattgttcttcgcaaatcttgaagatcattaaccaaggattttcttcatatcctcttccacagtactgatcttctgaatattataattctccaccagtatcttccatacattttcagagacgaatgcaggaagtgttggaccaagcaggatatttttcacaccgagagataatagcgtaagcaggatacatacggccttctgttcataccaggaaagaaccagggtgagcgggaggtcgtttacggtacagtcaaagacttctgcaagtgcaagagcaactttaatagcgctataagcatcattacattgccccatgtccaagatccttggaataccgtcgatggaaccaagatccaggtcattcaaccggtattttccgcaggcaagagtcagaatcaaggtgtccataggtgcagctttggcgaaatccgtataatagctgcgtcctggagcggcaccgtcgcatccgccgaccagaaagatatggcggatcttgccggcctttataagttccacgatatgcccggcattagaaagaacagcattgtgggcgaatccggttgtgactgtagacccgccgttgattccggtcatcggatgatcttccggatatcccttgcattccagagctttctcaataaccggagtgaaatctttgtcctctccgatatgcaccagatccggatatgacacgatggaggtggtaaatacccggtcgcagtaactctgacggaccggcatcagacagttggtagtaaataaaataggtgccggaatgttgtgaaattccgactgctgactctgccaggcagttccaaagtttccttttaaatgagaatatttctttaattccggatatccatgtgctggaagcatctcactgtgggtgtagatattgattccttttccttccgtctgctttaataacagttccatatcatgaagatcatgtccgctgacaacgatgaaaggccccttttcgatggtcagtggaacttctgttggtaccggattgccataagtaccagagttcgcatgatccagaagctccatgcagcgaaaattgatctcgcccgtttttaatacgagtgcaagtaattcgtcactgctcttttccgaagcaatggcttcgagcccttcatagaagaaatcaaggacatttctgtctacataatccaacgcataagcatgataagcgtaagcagccatgccgcgcagtccgaaaagaatcagagactttaacgagcggatatcttcctgatcttcccagatatggtggacatcataattcatgatatccggatagatccggtccttttcgacatttacttcacgaatgagttcgatgatcgtatcattgaaaaaattaacattggtaatcgtggtgaataacccttttaagataagttcatccgcatgttcgaaagaagcatccggattcagggcaagctttttacgcacggcacgtgacaggccgatcagcgcactggtaagctcatcttgataattggcggtgtcacttttctttccacagacaccggcacgcccttcacatccggaattatgagcggtctgctgacactggaaacaaaacatttcttccataataaataccttccttgctatatatttatgacagaattagtatgttcccactgaataaaaaatatgcagggaaaattaaccctgcatatttttaaacgaatcaaaaagttccatgtcatcggctttcagcttgacattggtacaataatttttcccttccggtgtagtaacattgatctcgatgattgatccctctactaatgcgtcctgtgatacggcgcgtaaaaacagcgggaattttggatggttggcacgaaaacgatccatgcctgattttatcttttgcatcatggtgatctgtcggaaatccatgtgtttatcctcctttattttcagtaaatattacagattatagaaaaatctgctgttgttgtaatactttgatattgttaagacataattttgtttattcagaaactgaaacaattatactgaaaaaagtttggaaagtcaaaagaatttgtctatgaaagatgggatgaaagacaggggcaaatgtgataagatagtaagacatagtgggggtgggaaaatctgcggatcaaaaaagtgatgagtagaaaaagacgaaatgtaaggagcaaggacagaatgagtgaggcaatcaaagaagcggaaaagatactgaaacaatactacggctatgaccatttccgggagggacagatcccggtgatcaaagcggtactgggaggcagggatgtgcttggaatcatgccgaccggagcaggaaagtcggtgtgttatcaggtgcctgcacttatgatggaaggaattacaatcgtgatctcgccgctgatctcacttatgaaagatcaggtgggaacgctgaaccagatgggagtccatgccgctttcttaaatagttctctgactgcaggacagtattacaaagcactgcagcttgcaaagcagggaaggtacaagattatatatgtggcaccggagcgtctggagacagaaagttttctggattttgcactgtctgagcatgtaaagatatccttcgttgcagtagatgaggcacactgcgtatcacagtggggacaggatttccgcccagggtatttgaaaatcctggattttctggatcgtctgccgtaccgtccggtggtcggtgcatacacggcgacggcaacagcagaggtaagagaagacatccttgatatcttaaagcttcagaacccgtatgtggaaacaaccgggttcgatcgtggaaatcttttcttcgcagtgaagaaacctgtggataagtataaggaattagtcagttatctgaaggaaaaaggatgtgatacatccggtgacagtggaatcatttactgtctgacaagaaaaagcgtggagcaggtctgttacgctctgagaaatgaagggttctccgtaaccagatatcatgccggattatcggatgaagaacggaaggaaaatcaggagaacttcatatatggaaagcgtcagatcatggtggcgacgaatgcattcggaatgggaatcgataagccggatgtacgctttgtcattcattataatatgccgaaaaatatggaaagctattatcaggaggccggacgtgcaggaagagacggggagccgtcggaatgtattctttattatgagccgcgggatgtaaggacgaaccgtctgtttattgaaaatggagaagagaacagtgagttggatgaagagacgcgcaaaatcgtaaaagaacgggatctggaccgtctgaaacagatgacattttactgctttacatcagaatgtttaagacaatatatcttgaattattttggagaaaagagcagttcttattgcggaaactgtctgaactgccagacacagttcgaaaaggtggatattacgccggaagcaaagtcgatcttaagatgtcttgcagcgctggactggaattacggtgcatcgacagtgatcgatatcgttcatggcggaaaaagtcagaagatccttggcaaaaatctggataagaatccggaatatgcagtgttaagtgaccggacggtcccgagattacggcagatactgagagaattacagtttcgggaatatgtggaagaaaagggcgaacaatatccggtgatttgtctgactccggaagggaaagcttttatggagacggaagaactgctggtcatgaagcttccgaaagaagagacagaaaagaaatctgaatcaaaagagaagaagaacagacgtaaaaaaggtgctgtggcagcggaactttcggaaaaggatgcagaattattcgaaagcttacgggaactcagacgcgagattgcggcggaagaaaaagtgccgccgtatatggtatttgcagataagacgcttgccggtatgtgcgtgatgcgtccggcgacgctggatgagatgctggaagtatcgggtgttggagaacataaactggagaagtatggagatagattcttagaaattatcagaaagggataatagatatggcaaaaaagaaaatatatgcagtaagaaaaggacataagacaggattatttgagacctgggcagagtgtcagaaagctacgtccggatactccggagcagagttcagaggcttcacagacagagaagaagcgatggcattcttgcaaatgtcaactactgcaaatgtatctaaggatgaagaaaaagaagcagcaggaattgttgaagtgccggaaaatatggtgattgcgtatgtagacggaagctttgaaaaaagcatcggaagatatgcatttggctgtgtgatcctgacaccggccggagaagaattcagaaaatccggaagcggctgtgatccggaaggcgtgaagatccggaacgttgcaggagaaatgctcggcgcgatgaatgcagtgcaatgggcgaaagagcatgagtatccggcagtagagatccgctatgattacgaaggtgtggaaaaatgggtgacaggcgtgtggcgggccaagacaccgcttaccagcaagtatgcggcacatatgcagaaagctgcagagcagataaagatatctttctgcaaagtcgcagcgcatacaggaaatcattataacgaagaagcggatcagcttgcgaaaagtgcattgcttcgtacggatgaaaatgtgagtatatagaggaagcagatgcagtttacatgaagatgtgaactgcattttcagcaaaaatacatacagaattcataaagtgttaatacaatattggcatattctggtgtatactaaatacaaataatagataaaatcagaatgtaacagtagaatgcagctgataaggaggaactctatgaaaaaaaacgacaggcgaaaacgaaaactgcaggaagaagcctgtgattatgaaatagaacgtacaccgacaaccagatacgagccggattatgaggaaggcctgacgtcggcgcaggcagaagaacacaggcgtgacgggtggggcaacatatcagtcgatcctccggcgcagacaacggaagagatcattaaggaaaatgtatttacatattttaatctgatctttctggttctggcgattcttctgataattgtgggctcgttccgtaacctgacattccttccggttatcatttttaatacactgatcggtatcatacaggaaatccgttctaaaaagacactggaaaaattaaatatgctaaatgcaccacatgcaacagtgatcagagacggaaagacttcacgggtcaattcggagagtctggttctggatgatattgtaatctttaaagcaggaaatcaggtctgtgctgatgcagaagtggtacatggaagtgtgcaggtcaatgaatctcttttgacaggagaatcagatgagattaccaagaatccgggagatcatctgatgtcgggaagttttattgtggcaggagaatgtcatgcaagactggatgcagtaggtgtggattcctacatttccaaactgacactggaagcaaaagcaatgcagaaaggtgagcagtcagaaatgattcgttcacttgacaaactggtaaaatttgtcggtatcgcattgatcccgatcggaattatactgttcgtgcagagcttcttctttaacggagatccatttcgaagcagtattacttctatggtggcggctgtgatcggtatgattccggaagggttataccttcttgcgagtgtagcaatggcagtcagtgcaatgcgtctggcaaaacagaaggttttacttcacgatatgaagagtattgagaccctcgcaagagttaatgtgctttgcgttgataagaccggaacgatcacagagacaaacatgagtgtaaaggatgtggtcccgacatccaattataaaaaagatgaaatgccggaacttccgaaaatgcttggtgattttgcgaaagcaatgagcagtgataacatcactatggaggcattaaaagaatattttaaagaaggaacgggaaagaaggccgggtctgtaactccgtttacatctgcaaccaaatacagtggtgtcacatacgaagaggaagtacatgtacttggagcaccggaatttgtgctgagagatgattttgatgaatataaagaagagattgaagggtatgcaggaaaaggaaaccgtgtgctggtattcggtacgtatgacggagaactggacggaaaagcactgaccggcaaggtaacgccgcttggatatgtccttcttgccaatccaatccgaaaagaagcaccggagacatttgcttactttgcagagcagggtgtagaagtgaaagttatatccggagataatcccctgaccgtttctgaagtggcaaaagaagccggaattgcaaatgcagaccgttatgtcgatgcagcgactcttcacagtgatgcagagattgcagatgcggttgccaattatacagtattcggacgtgtaacaccggatcagaaacgtaaattcgtacatgctcttaaagaccagggcaagacagtagcaatgaccggagacggtgtcaacgacgtactggcattgaaagatgccgactgcagtgtagccatggcatccggaagtgacgcggcagtacaggcttcgcaggtggtattactggagtccaactttgcatgtatgccgtcggtagtaatggaaggaagacgggtggttaataacatccagcgttcagccagtctgtttctggtgaagaatatcttctccttcctgttgtccttattctccgtagtgctgatgattacctatccgatggaaccatcccagatatcgctgatcagcatgtttacgatcggagtacctggattcttcctggcgttccagccaaataaagaaagaatacagggacatttcctgaccaatgtattcctgaaggcattgccggcaggcctgaccgatgtactgatggtcggcgcactggttgtgttcggtaagacatttggcgtaaatactacagatatctcgacagcagcaacgatgttgcttctgatcgtaggattcatcatcctgttcaatatctgtaaaccggtcaatatcttccgcggtgtagtctggggaggatgcctgaccggctgtatcttatgtatcatcttcctgccgaaattattcgcaattacgggaatgtcaacgaagtgtatcatgttattcgtagtattctcgattgcaaccgaggcagtactgcgatacctgacacttctggtaaaaggattgcagaaaggatatcggaagataaggcatagagaagaagggatttaattcaggaaggcatgattacccggacctgcataaaaagtaggaagccgttcctgttcaggttccgtcggtggnnnnnnnnnntcattcactccgattccacccggtttatcaatatatgcacgaaggtaccagttacttccttcttttacatattcgacatccaccagttcaaatccatactcttccacgattggaagcaggatctcttctgttttctgttcatacatttctctttttgacaatctaaaatcctccttatgcagaccttacttatctatgtttctatatcagtcggcactctcttatctgcacatactttgatatgcaacaaagaagagtgaacaatatgtccactcttctgccgattgatttatgtaactaaattaactatagcaccgttcttttgtaaaatcaagggattttgcgtattttttacacttttccgtgtttgaacgccatcatcatctcgtttgtcaggcttaagtcttctgcctctaccggcatcttatcccgttcaaaccactccgccatggcaagttcatcggtatccagtgtgataccgtcctccccgtccagttcacagaagaatcccatcagcagcgtatcggtaaatgaccacggctggctcttataataccgcaggttcttcaccttcagtccgacctcttccatgacctcacgccttaccgtctcttcaatggattcgcctgtttcattaaatcctgcaagcagtgcatactttttgtattctcttcccgcatactttgacatcagaatcttatccccatgtgtgacagctatgatcaccgccggacagatcttcgggaattccatcataccgcagtccgggcagcgcatcatacgctctttgtcgtcatgcaccatcggctgtccgcagtgaccgcagaacttccgcgactgataccagcggtaaagctgccatcccgtcactgccgcaaactgtctgtatttcggtcttgcctcgcggaaatactgattgtccttcagttcgaatcctgggaaattctccggatcaattccttctgccagataatatccctgtccgtcaattgaaaagagatacgtatactcttcatatacatccggattgtaaactgccgcctctttaaatgtaaggaacgagatctcctgatcctcaatcttcaccaggatctttcttccttcataatataagatcacgctgtcttcctttggcggctccggtacatattcatttctatatacatgcggttctatgttctgtatcatatcgtttaccctctgtatttggttcctgttccgtctcgttttgcaagtttcaggcggttcagggtaacttctttttcatggtatgaaatcttacactcggttccttcttcaaacagatacacatctgtcagtgcatcgtctttcttcagacggatgccgcgcactccgatcgcacctttcttcttctccgtcacttctgctgccgggaagcgtaagaagaatccgtccgttgtctgcagtacgatatgctggttctccgtcacaacctggatcttcacgacctcatcttccggctgaagcttagttgctgtaatggtacgctttgttacctggaattccgttccttcgaccttcttgatcatcccctgctttgtggcaaataaaagcttcgcataccgcatctgttcggagtcgcagatgtacacgatctcttcctgcgtgctgtcataattactgatattgtcgatcggctgtcccttgtcacggaattttccatatgggatatccatcactttcacctgatgcatctttccatcttttgtgaaaatgcagatcttgccggtattcatgcagtgcaggatgtatttattctcattatctgccgcttctttattacgctcataagtacttacatctaccgtcttcgcatatccgaaacggtccattaagaacacaacttcctgttcttcgactttcttctcttcaaatacagcttcttctgcattctctacaaccgtacgtctctttcttgcgaattccttcttgatacggtccagatcttccatgataactgctgccatcgaatcgtaattattcaggatatcttcatatttttcaatcttagccagcgtctcttcatgttctttctgaagtgcttcgatttccagaccgatcagcttgtacagacgcatctccaggatcgctgttgcctgacgctctgtaaatcttaacattcccgccatctttttggaaatggaggacttgaacttaatgttctctgtctccccgttcatcagacatgcctttgcgtcttttacattctggcttcctcttaagatctcgatgatcagatcgatcacgtcacaggctttgatcagaccttcctggatctcttttttatcctgctctttcttaagtaatgtcttatattttctcgtcgccatatcgaactggaagtctacatgtgcctcgatgatacgcttcaggcccatggtctccggtcttccgtccgcaactgccagcatattaactccaaaggtatcttccagtcgggtcttcttatagagcatattggtcagattctctacgtccgcacctttcttcaggtcaatgacgatacggattccttctttggacgactgattggaaatatccacgatgtctgttgtcttcttggtctctaccagattgcagacatcatttaagaatttcccgattcccgcaccgatcatggtataaggaatctctgtgatgaccagacgtttctttccgcccttcatatcttctacttcaacttttccacggatcttgatctttccggttcctgtctcgtagatctccggcaggtcgtctttgttgaccacgattccacctgtcgggaaatccggccctttgatatatttcatcagctgtctggtcgtgatctcctcatttttcatataggctttgacaccgtctacaacctctcccagattgtgtgtcgggatactggttgccataccgaccgcgataccttccgcaccgttcaccagaaggttcgggatacgcaccggaagtacgaccggttccttctccgtctcgtcaaagttcggcatgaagtctacaatatccttgtccagatcagccagatacgcttcctgtgtgatcttcgcaagtctcgcctcagtataacgcattgcggctgcaccgtctccttcgatcgaaccgaagttaccgtgtccgtctacaaggatcattccttttttaaattcctgtgccatgaccaccagtgcgtcatagatggaactgtctccgtgcgggtgatatttacccatggtatctccgacgatacgcgcacatttacggtacggtttgtcataccggatccccagttcgtgcatatcgtaaagtgtacgtctctgtactggtttcagtccgtctcttacatccggcagggctctggcaatgattacgctcattgcataatcgatatatgattttttcatcacgtccgaatattcggttctgatgatctgtgaatcctgcattgtatttctcctatcctatatatctctatatatcaagttccgcttctgtcgcattttcataaataaatgaacgtcttggcggtacttctgatcccatcagcatctcggttacgctggatgccattcttgcgtcttcaatctctaccagtttcagcagtctggtttccgggttgagggttgtctcccacaactgttctgcatccatctctcccagacctttgtatctctgtaaggtaaatggaccgtcatgcgtccttctgtatttttccagtgctttatcatcatacagatattcttcctcgcctttcttcggcatcgccttataaagaggcggcatcgcaatatagacatgtccttcgaaaatcagttccggcataaagcggtagaacaacgtcaaaagcagtgtcgagatatgggcaccgtccacgtcggcatcggccatgatgatgatcttgtcataccgcagcttgctgatatcaaagtcatttccatatccttcggaaaatccgcagccaaatgcattgatcatcgtcttgatctctgcattcgccagcactttatcgatacttgctttttccacgttcaggatcttaccacggattggaaggattgcctggaacatacggtctctggctgtcttcgcagaccccccggcagagtctccctctacgatgaatatctcacattttgatgcatcacggctttcgcagttcgcaagctttccgttactgtcaaaagaatatttctgcttggtcagaagattcgtcttcgcacgctcttccgtcttacggatctttgccgccttctccgcacagccaatgactttcttaagcgtctccagattacggtcaaagaaacggatgatctcatcgttcgtgaccttactgcaggcctttgccgcgtccggattgtcaagcttggtcttcgtctgaccttcaaatctcggatccgggtgcttgatcgatacgattgccgtcataccgttacggatatcggccccggtaaagtttgcatccttttctttcagaataccaagttctcttgcatactggttgatcgccgttgtaaatgtcgtcttgaatccggtcagatgcgttcctccttctgcattgtagatattgttacagaagccaagtacattttcatggaactcgttgacgtactggaaggccacttctacttcgatgccttctgcttcccctttgaaatacaccggatcatgtacgacttcttttttatgattcagttcacggatgaatccaaggattccgtccggctcatgataaatgatctgttccggttctgctccccttttatcttcaaatacgatcttcagatccggattcagataagcagtctcatgaagacggctctttacctcttctgctttgaactttgtcttttcaaatatcgtatcatccggaaggaaattcactttcgttccggtctttcttgtctttccgatcgtcggcagtaatccgtcttccaattcgatcaccggttttccccgttcataccggtcatggtggatatatccgtccctgctgatctgcacatccatataggtagacagcgcatttacaacagaagaaccgacaccatgcaaacctccgctggtcttgtatgccgaatcgtcgaattttccgcccgcatgaagtgtcgtgtataccacacgagctgccgatactcctgttgcatgaaggtctaccggtacaccacgtccgttatctgcgatcgttgccgaaccgtctttttccagtgtcacatggatctcgctgcaatatccggcaagatgctcatccaccgcattatccacaatctcatagatcagatggttcagacctttagttgaaacacttcctatatacattccgggtctttttcttaccgcttccagtccctccaggatcgcgatacttcccgcatcatatgtattctttttcgccattctttctatatcctttctccgtttccatctgtatgacagacattgaaaaacatcacatctgataccttccacaagtatcatacagatttttccatactttggatatcttatcataaaaatattttcgaatcaagacagcacctgatgcagaagctctgcaagaagttccatagcatttcgcatctcttctactgtattcgtctgcgctcctgcctcgaccagaagtgtcttcggtttgaaatgcatgttatagcggtatgcccgaaggaaaatgtgtctggcaaatcccggataatatttggctgctgcaatctccatctgaagtgaaaatgccagattgtcttccagatatggattcggaagataactgatatttccatttgcccgcgttctgctgagtccgttgaagaacatgatctgcgccgtctgtctgccatccacctctgtcacaagatgtgtcccttccgccacaccgtcccggtggaggtcgatcaccacttctatacttggattatcttttaatatcttctgcacatccggttccgcaagctgatatgctttgctgcggtccagtttgccatttaccagatcataaacacctgtgtgatgatacgtctcgattccatacttttgattcaaaagatctgtcagatacgttcccatacctacaatcgatgtattcgcatcccccggaacagaatctttaaactgctcctgggaatgtgtatgatagatcagcaccttcggtccggctgcctcttcattagaattggaattcagcttcatattctttccaagcagccggtctgcattgatcagatttgcatccgccatcgtactgctgtccactgtgtaaaaatggctcatcagatattcgtaatctcttaatttatccatggatatgtctactttagcctccggtatcttcaccatctcctgctgcgtgacactttgctcctgcgtaatgagctttccattttcatccacggcattttcatcatttgcctgcttttctaatatcatggcataggtctgggaatcttcggctatagtatcctctttttccgctgacagataggttccaatcgggaacaatttcatcactgtctgtgtcacgtcctctgcaggccctccgacatggtctttttccgatgtataagccagtgtcgtcattatatttccgacagcacaatctgcaatgacctcttttcctttttccaggaatgatattttcagttctcgtactgttccattttcttttattacatgacctcttatgaaacaggtcagaagtattccagcactgccccaggctgcacacttcatatatttttccaacattctctgcctgtctttctttttcacatttttaacacctctgccgtttactgatttttacgatatcttagttcttactataattatggcaatattgtaaatgttatgactgcattattttttctttccccgcaaaaagcatattcattgcttctgaaattgtataactgattcgtcttactgtatcatcaatatcttttggtgtcacaaacataccattcagatgcggagcaatcaattcctttaccagttcatatttctctgcggaattatatccctgcaataccactcccaccccttttaatgtttctgatgtttccagtgccataataaagttctccattgtatcattcacaatggttgccgcatccacaactgtcggcactccgattgcaatgaccggaattcccatcgtatcttttgtaatctcacttcggtgatttccaacccctgctccaggataaattcccgcatcagaaatctgtattgtccggttcagtcttttggtacttcttgctgccagtgcatcaattaccataatcagatcaggggttgtctcatttactattccccgtataatttctgcagactccatcccggtctgtgccatcactcccggaacgatcgcacttacaatcctgcttccgccttttcccactgcataccttccatattcctgcacaatatgtctggtaacattcaactgatccaccacatacggtcccagtgcatccggtgtcacttcacgattgccaaggcctacaacaagtaccgaatatcctttttcctgattttcttccgtatctttcatatatttttccaaaaaatctgccaatgtctccgatatttccctgtgatacccttcatctgcagctgccatattcggcgcttccagtgtcagatatgttcccacaggttttcccatcgacttcgccccattttccgtttcaatcctgaccgttgtgatcttaatctccttttcttcatcatactcctcttccagaacgacacctgatacttccacatgatccgattcaaaccgttctttctgttccatcgcaagatccgtccgtatcttatacttctccaccatcatttttatccatcctttctcaaattaatgctagtttttccaatattttcagaaatatgtattgacagattccaattcatgccctaaaataaattcgtatgtttcgttagatcgtccgtgtccggctctaacgaactggaaatcgaattaaaaaaatcgaaatacattgatatcggaggtggacaaattggctaatatcaaatctgcaaagaaaagaattttagtaaacgaaacaaaagctgctagaaacaaagcaatcaagtctaaagtaaaaacttgcgtaaagaaagttgaaacagctgtagctaacaaagatgccgctgctgctgcagacgcattaaaagttgcaatcgttgaaatcaacaaagctggaagcaagggtgtttaccacaaaaacacatgctctagaaagatttcccgtctgacaaaagctgttaacggaattgcttaataatagagattaaactcgagttgcaaaatttttagaacccggatcatcccgtcaatgatctgggtttttttctatttaattcatcatcgcggcctctcagtccacgagaaagacttggtattctgtttgttgctggatgtcacaatgcagaagttctaaggcagtccgccttccctaagggcaaaagccactccgctcaaactcacccctacggggctcaaacagttcgctccggataaccagcttagtgaattaactagaaaaaggatacagcaatcgccgtacccttttcgtatgtattcttattctaacaaatctgatgattagttgttgatcagtttgtcttctccattccagctgtaaagctttctgatctctgctccgactttctctgatggatgttctgaagcaagttttctcatagctttgaagtgtacctgacgtcctgccggagacatgtctaataagaagtcttttgcaaatgttccgtcctgaatgtctgtcagaatctgtttcatagctttctttgtctcagctgtaacgatcttaggtcctgttacatagtcaccatattcagctgtgttagagatagagtatctcattccagcgaatcctgactgatagatcaggtctacgatcagtttcatctcatggatacactcgaagtaagcgtttcttggatcatatccagcttcacaaagtgtctcgaaaccagcctgcataagtgcacaaacaccaccgcaaagtactgcctgctcaccgaagaggtctgtctctgtctctgttctgaatgttgtctcaagaagaccagctcttgctccaccgattgcaagaccatatgcaagtgcacggtcccaagcttttcctgtagcatcctgctctacagcgataaggcaaggtgttccttttccagcctgatactcacttcttactgtgtgtcccggtgccttaggagcgatcattgttacatctacattctttggtgggttgatgcatccaaagtgaatgttgaaaccatgagcgaacattaacatgttaccttcttcaaggtttggttcgatatctttcttgtacatatctgcctgtaactcatcgttgatcaggatcatgatgatgtcagcctgttttgctgcttcagctgctgtgaatactttgaatccctgggcttcagcttttgcccatgatttacttccttcataaagaccaacgataacatcgcatccagactcttttaagttcagagcatgtgcatgtccctggctaccataaccgatgatagcaatcttctgtccctctaatactgataaattacaatcttcctgataaaaaattcttgctgccattatagcatacctcctaaaaaataaatgattttttattttcttaaacaaggggtcgcccttccaccgggctcgtctctgtttaatgtctgattaaaatgtgttactgtttgtccattataatatatcaattataatgtgttgatgtttccttcctgatcaatgactgttacatccttgattcctctctgcaatccggtaatacctgttcttgcaagttcaagaatctcgtaaccttccagaagttccagaaacgcatctacttttgaaccatttcctgtcagttccaccatcagggaatccttctctacatcaacaatcttcgcgcggaatatatccgccacagatatgatctccgttctctccgtcttattcgcccgaaccttcaccatgatcagttcacgatataccgaatcttccggctgaagtactttgatctcaatgacatcttccagctttctgacctgcttttcgatttgcgataagatcagctcatctccgctggccacaatggtaattctggtaaatctcggatctgccgtaactccggcagttatactgtcgatactgtatcctcgtctgctgaacagtccggatacacggcttaatacaccgggattattgtctaccaataatgaaaatactctttgcatattgcacctcttttctatcatttataaaaaacagagtgcgttctgtttttttataataacaactacttcttcttttgtcaagtattggcacccatatttttacatttttcacaaaatgcaggattaccgcattacttcaggatgatcccggcaatgtcttccggcgtcccggcaacgtatactgcgcctgctttttccagttcttcacggttgccgaatccgtataatacccccatacagtcaagcccttcctgctttgccccaagcacatcatgttcacggtcaccgatcatcagtatcctcttcttatcctgcatccggcaggtatcgatcagatatccgatcacctctgccttactgcctctgcctccgtccagttccatacctgccacatattcaaaatattgatccaggtcaaaatgttcaatgatccttctcgcatatacttccggtttggacgtcgcaacaaaaagtctttttcctgctgtcttcaatgcctttaatgatttttcaaatccgggatacaccgaacactcaaaaatccccgtatcctgataatattccctgtaatactccaccgccttccagcttttctcatcgtcaaatccatagaatctggcgaacgaatcggtaagcggcggaccgatgaatttatataatttttcccgttcggtctcttcaattccgaatttctcaagcgcatacatcaccgaattcgtaattcccggtgaagaatcgatgatcgtgccatccagatcaaagaaacagatatcatacattttatcaagcttttctttttccatattctctacctgcctgcttcaaaaaaataccggagccgtccttctgcgttttttccgcatccgtcacaccccggtattattataaccgttccatctatacttttgcaaactgtatcatccagagaagcagaagatgcaccggataaaatccgtagaaaaaccattttccccagccgtgtgctgttttatctgctttgttatacatacactgtataaccactcccgatgctgccggcccgatacaggcgcatgtagaatgtatgagcgcactctccagcccgcagtccgccctgtatgacaacacattcaacagaaagaagagtcccactgcttttccataagccagtgatacttttttcctgtccccatatgcatttgcaaacagcatcgtaaataccggtgccagaagtgcccagtccgtccagagcgaacagattaccagcacgcacagccatagcattttctcccctttatgttttacatgatctgcaacccacaccactcccagacatagaagaaggctgaacatcatgttcaggttcgtctgtttcaatgccagcatgaaggggatctgtgaaaggatcccgaatacaagcagccgcagtgcatagttctttacagatcttgtgtaatgatatccttccacaaggaaatagcacatagtaatggctgtaaaatacccgatatcaaccataacttcctgccctgtactgccttcttttaaaaatatataggcaaaatgattacagaacatagctgccattgccagatattttattgcatttctactcatacttccctctccattttcattcttcgatatttctgataaatccgacataggtcgctccaaaataaactacatatacgccaaagaacagggcgaatgaaattgcaaaatactgtaacaccggtgtactgactcctgtatagaaagtaaatccggcacccatatacaccgctatgatcccgctgatcactgccgaaaggattgccggacacagataatacccggacagctgacggaatacggtctgttggatctcgcgtcttccaaggccgattttcgaaagcacctggtagcggaacctatattttgccgaatcgctcagctgttgtaccgatagcaccgtcaatgcaatacacaaaaataccagcccgatatacatacatgggaatgtgatgcaactcatcatatatctgacctcagccgatgcattttcccgcacaagattcaccgcagcatatgtgacaatggtatccgtaccataacatacattatcatcgtcttcttccatgtatgtatgaccggcataatcatgtttatctgacagatcatccagcttattctgcaggttatccggtacttttttcttcacacttaccgcaagttccgaatagtatggtgtcatctgctgtatccgttcatccggcacaacgatgatataatcaccgccgttatgtccgtcctgcgaaaatgattcggtgcagatcttcctgcaggtcagtgtctctcctcggtcctgaagcttcacgtcatccgtaaaatctccggtttccttatacactctttgcttcatctgaaggatatattcattttttccaagcgtttccgtggaatatcccagcatttttctcagatgattgtaatcactcagacccatatatgtatcatatctgcaatatgcatcatcatcggaacctttacgtatctttttctcatccggtgttccgtcttctctgcggtactcatctccaaaataccgcagatgcgtatacagccatgtattcattgtgttcgtatgattttcataaatacggtacacgcacgaatcctttacacctgcttcttctccgacaatatccaattcctttgcaaaatcatattccggattctgactgttcacctgtacatcaaatggaaatttcatctctaaaacctgattctgccagtccgtaaacattaatgcaaccgagcaccccagaaatgcaaccataaaaagcaccgtaagtgttcccatggtaaaccgcatcgttttcaatttagatgcaaactgacgcagcaggaacagattctgcccccggtagaccgcatttccttttttcttcacatagcagatgatccatgcggaaagccctgtataaaacacatacattgtaataaacagacccgtcagaaatactactgcccctcccggcgactgtatatttccgctcagtatccagacaccgaacgcaaagatgaacagaatggaaaacggcagtaataaccgctttattttttcattcttttcttttaattcctcattcttctgattttctctcatcagatcatgaatgttcatcttgcggaatttccggctgcaccggaacagtgccagcagataacatcctgcaaagcagcacacagtcataaggaaacaatatccattgaattccagatggggtcttagttccacctgtatgacactataaaggacaacgagcagcacctgctgaagcaacattccaaggcccagtcctatcacaaaggaacacacaccgagcagcagattttctttcatataaagcccggacacttcctttttattcattccgatcaacagatagataccgaattcacggctccttttttccagcatgaaccgtaccatataattgatcagccatgcaacgatcagtacaataaagaatgtggcaataccgatcatcgctgccattatcgctgccatttcatacattttctgaagatccttcgaaaaaatgatactgttaaatgcaaacatcaatgataccacaaatgtcatcgtcagcacatacaccagataatctctggcggaacgtctgacattgcgcagtgcaagcttaccgaacatctgacagttcacctcctgtcagagataatacatccaggatcttattcagaaattcccgcctttcttccactcctcttaccagttcatggaatatctttccatctttcaggaaaagaatacggctgcagtagctggctgaaaacgcatcatgtgtaaccatgaggatcgtagagtgcatatcacgattcatcttgcggaatgtttcgagcagcatctgtgccgctctggaatccagcgcaccggtcggctcatctgcgagaatcagtttcggacgatgaatcatcgctctggcacaggcacaacgctgcttctggcccccggatacctgataggggaatttatcccggatttcttcgatatcaagcagcttcaatatgtgatcacatttctcttggatctctcttttactcttgctgtgcagcgtcattgccagcacaatattctcttctatcgtaagtgtatctaacaagttgtaatcctgaaatatgaatccaagattgtctttccgaaattccgccagtgcctcatcactcaactctgtaatatccgtttctccgtagtatatatgccctgcagtcacacggtcaatcgtagacagcatattcaaaagtgttgtctttccggaacccgatgctcccatgattcccacaaattctcctttttggacgcaaaagcttaccctgtctaccgctttggtgatgttcgtatcacttccgtaatatttttccacatcacacacccggatctctccatccgggattctgcctcctgccaggattctgtctgtttttttctctgttgtcttgccatgctttcttattcttctcatccatatcatcctttccggtctttttgtaatactctttttcatctctactttacccgtccggaccagaaagatgtatcgatgtatctttcagttatcttacatttttgaaagataactgctgaccggaaatgtaaggatcatcttcgtgccttcaccacgaacagattccgcctcgatggcaattccaagcttttcacacagccgtctgcacagataaagccccatccccgtagatttcttaccatttcttccattggaaccggtaaaacctttttcaaagattctggacatctcttcttcccgtattccggttccgttatcttctacgatcagccggacaccatgaccgtacctttccgtgtaaatatgaatatacggatggacctttggattctcacttttatatttcacactgttcagcataagctggttcagtataaaaaggatccactttttatcggtatacgcaagatcagggcactccacttccccgcgcactccgttactaattagataatacttatttttcatcaaaatttcagaagccgccttcccaaggtctgtctcttcaatcatatagtctttgtataccttttccattctagcataatacagaaccatatctacgtcattttcaatccgttgattctcaagaccgatctgtctggtcacttcgtctttatgattctcacacacaagctggatactggtaatcggtgctttgatctcatgtacccagctttcgatataatcccgataatcattctgttcatcttcaagcatacggatccgttcgatcacagatttattcgatcgtctgatcaactcccggtagatccgatcttccagatatggtgaagctggcagcaattctccaagcagatatctctgatctacattttccagaatatgttctgccctgtcaaaatatttcttcctgcgataatatcctgtcacaatccatatcccaaggatgatccaccagaaaatgagaatcagtgcagctgcgtttctgttataccctgtaatatagaagaaccccatcagtaatatcatacacaggaggtgcagcagacatatcagaatcttatcttttatatattccgaaaatttcatatgcggtaccccattccccgttttgtctcaatgaaatccgtcactccgatgtcagccagttttcctctgagtcttgtaacattcacacttaatgtattgtcatctatgaagacttcattgtcccacaggtattcgatcatatccagtctcggaacaatctcaccctttttctgatatagaaggtgcaggatcttcaactcatttttcgtaagatctgtcttttttccttcatgctctatgcagcctcccacaacatttaggattacacctttatattccatgttcaaggcattaccccttgatttctctgcatttttaccagtagttctttttagtactacgcctattcttgccagcagaatcgggggattgaacggttttgtgatataatcatctgcccctttcaagattccggtcagttcatccatggaatctgtccggctggtcagaaatatgattggaatatctgaatgttctttcagcttcgtacagatgtcaaagccgctttcccccggaagattccaatccaggagtaccagatccggtgccggtatcatgctgcatatctgctctgccgtatctttaaattcttcgattatctctgcttcataaaaagcattttccaggagctgttttaattcctttcggatacccggatcatcttctacaataacaatcttcatgtcgttctcctcatgatgttccttttataattatactgataaatacagaacagattgtagaaaatacgcttttgcattttccacaatctgttcattatagcatataacatacgttgaatatgtttgtattatttcacaagaagtgatgttccagtcatctcagccggctgttccatacccatcagttcgatcagtgtaggagcaatatctgccaggcatccgtcttctttcaacttgtatgcaggatctgcgtttacaaggatgaatggtacaggattggttgtatgtgctgtaaatggctcttttgtctcttcatcgatcatgtactctgcattaccgtgatctgcacagatgaacatctgtccgtcagcttcttttaatgcttcgtaagcctttcctacacactcgtcaactgcttcaatggcttttacagcagcctcgatcacaccagtatgacctaccatgtcagggttggcaaagttaattacgataacatcatacttatcagacttgattgctgcaacgagcttgtcacatacttcatatgcactcatctctggcttcaaatcataagtagcaaccttaggagattttacaagaattctatcttctccttcatttggttcctctacgccgccattgaagaagaatgttacgtgagcatacttctctgtctcagcgatacgtgcctgtttcttgccgttctttgcaaggaactcaccaaatgtattagtgatttcttctttcacaaatgcgacctgtttattttcgattgtagcatcgtattctgtaaagcatacaaatgttgtcttaattctgtctcctctgtcaaatccgtcaaagctgtcgtcacagaatgttcttgtgagctctcttgctctgtccgggcggaagttgaagaatactacggaatcattttctttgatcgttgcaaccggtgcgccgtcctttgttactacaaatggtacaacgaactcatccgttacatctgcatcataagaagcctggattccctctgtagcagaagcagctgtctcgccttcgcctgctgaaagtgccttgtaagccttttctacacgatcccagcggttatcacggtccattgcataataacgtccggaaacacttgcaacctctcctacgccgatttctttcatcttagcttctaactgctctacatactcttttcctgaagccggtggtgtatcacgaccgtcaaggaagcagtgtacgtatactttctcaagtccctgtctcttagccagttccagaaggccgaaaatatgtccgatgtggctgtgaacaccaccgtcagataccagccccatcaggtgcagtgcagaatcattcttcttggcattctcacatgcagccagaagtgctttattctcgaagaatacaccatcttcaattgcctttgtgatctttgtcagttcctgataaatgatacgtccggcacccatgttcatatgaccaacttctgagttacccatctgtccgtccggaagtcctactgcaagtccgctggcatttccttttacacatggatattctgacatcagtttatccataacaggtgtttttgccatagcaattgcattaccttctgtcttttcattcagtccataaccgtctaagatcataagtactgttggtttcttactcatttttaatatcacctttcgtcttaaatatcacttttacagcataaaaccgcaggaagcagtcaaacgaaagcctcctgcggctgattttctaaatcttatttgtagtttacgatctttccgaaatcagctttcagagatgctccacctacaagtccgccgtcgatatcagcctgagcgaataactctgctgcatttccagcgtttacagatccgccgtactggatacggatagcttctgctgtagcttcatcatatacttcagcgatgcatgcacgaataccagcgcaaacttcttcagcctgctctgtagtagctgtcttacctgttccgatagcccagattggctcgtaagcgatcactgctgtcttagcctgatcagctgttacattctggaatccaactttaacctgctgacggatgaagtccattgttacaccctgttctctctgctccagagtctctccacagcacatgattggtgtaataccatgctcgaaagctttcagcattttcttatttactgtctcgtttgtctctgcaaagtattctcttctttcagagtgtccaagaacaacgtattttactcctgcatctgtaagcatagccggagagatttctcctgtatatgctccgctttcttcaaaatacatattctcagcaccaacctggatattggttccctttacagcctctgctacagggataatatcgattgcaggtacgcagaatactacgtctacatcttcattagctactaatggttttaattcttcaactaaagctactgcttcacttggagttttgttcattttccagtttccggctacgattttctttcttgccatctttccaaatctccttattctatttatcgttagctgctgctacacccgggagttcttttccttcaaggaattcaagagaagctccaccacctgttgaaatgtgtgtcatcttatctccatatcccagctggttaactgctgctgcagaatctcctccgccgatgattgttacagcgtctgtgtctgcaagtgcttttgcaaccgtttctgttccttttgcaaatttaggcatctcaaagcatcccattggtccgttccatacaactgtcttagcatcttttactgcatcgctgaagatcttagctgtctctggtccgatgtcgagtccttcccatccttccgggatctctccagcttttactacctgagtatttgcatcattagagaaatcatctccgacaacgttatctacaggaagaaggagttttacacctttggcttttgctttttcgatcatgtcaagtgcatactggcagtaatcttcttccagaagggattttccgactgttccgccctgtgcttttgcaaatgtatatgccattcctccaccgatgatcagagtatctactttgtcaagaaggttctcaattacagaaatcttgcttgaaacttttgctccgccaaggattgctacgaatggtctttccggattgttgactgcatttccaaggaaatcaatttctttctgcataaggtatccaacaactgctgtatctacgtattttgtaactcctacgttagagcagtgtgcacggtgtgctgttccgaatgcatcgttaacaaatacgtcgcaaagagaagcgagatctttactgaatgcatcttcattctttgtctcttctgctctgtaacgtgtgttttcaaggaggataacatctccatctttcatctcagctactgctgctttcgcatttggtccaacaacttccggatcagctgcaaattttacttcctgtccaaggagttctgaaaggcgaactgctacaggagcaagagataattctggaaccggctgtccctttggctttccaagatgagagcaaaggataacctttccgccatcagcgattaattttttgattgtaggaagtgctgcaacaagacgattctcgtctgtaatctttccatcgataagtggaacgttgaagtcacatcttacaagtacttttttcccttttacgttaatgtcatctacagattttttattaagcatagtactgcctcctggttatatattttataactgcaaaaagggtccggcccaataagaccggaccctttgtgagtcttaattcatgctctaaattatgctaattcagagaagtatttgattgttcttaccatctggcttgtgtatgagttctcattgtcataccaagaaacaacctgaacttctgtagttccgttttccagtggaagtaccattgtctgagtagcatcgaataatgaaccatatctcattccaacgatatcgctagatacgatttcatctgtgttgtatccgaaggactctgtagaagcggctttcatagctgcgttgatttcatcaactgttacatgtccttttacaactgctgtaaggattgttgtagatcctgtaggtgttggtacacgctgagcagatccgattaactttccgttcagttctgggataacaagtccgattgcttttgcagcacctgtgctattaggtacgatgttaactgcagctgcacgagatcttctgaggtcaccttttctctgtggtccgtcaagagtcatctgatctcctgtgtaagcgtgaattgtgcacatgataccagactcgattggtgcaagatcgttaagagcttttgccattggagccaggcagtttgttgtacaagaagctgcagaaattactgtatcttctggtttcagtgtttcgtggtttacgttatatacgatagttggcaggtcgtttccagctggtgcggaaataacaacttttcttgctcctgctttgatatgagcagatgctttttctttagatgtatagaatcctgtacactccagaactacgtctacaccaatctctccccaaggaagttcttcagcgttagctttagcatagattttgatttcttttccatcaacgatgatagaatcatctgttgcttttacagtatcagctaaagcgtattttccctgtgaagaatcatattttaacaggtgtgcaagcatcttaggagatgttaagtcgttgattgctacaacttcatatccttctgctccgaacatctgtctgaatgcaagacgtccaatacgtccaaatccattaatcgctacttttactgccatgattaattcctcctaaagtttgtttattaactacttatgcagtctacattgtgaaatctttctcaagccctttagaagctctatcaagacctctcaactgctaataattgtactttatctgatacaaaatttcaagaggttttcctatttttatataagttgcttaaaaacaggcttttgttcaaaaaattctgtataatatttaaagccgcaggacttcaaaatttcttctgcctttgcaaaatcatacgcaatatgctccggtttatgtgcatcggctccaatcgtaatgatctcaccgccaagctcacgataacgcttcaatacatccggatgtggatgtgcgaacggaagtccatacttcaatccggccgaattcacttccagacccttttccttctcaatcaacagtttcaaaatctcgtctataatatccgcataatctgtatacgaatattctttttcccttgattttccatatcttacaacataatccagatgaccaagtgcctgaaagcagtccgaagttctcacattttccagcgttgtctccatcattagacggtacgcctctttgtcagtacggtctgtaaaaagcttttctgccgcaggatcagtatataatatgttcccttccgcatctttcttatacggaacattgtgaaccgatccaatcacgaaatcaaacggatatttcttcgtcagttcttcataataatctttcagatatgtcctaagtcccagttctattccaatcctgatattcagttttcctgcatattcttcctgaagtttctgcatttccacaaaataagcatccacatcaaagataccttcttctccccattccagatcatccttgtcaaaatgatccgtaaagcaaatggttttcaacccttttctgactgcctcatccgccatatcgcgtggacaggcttcggaatccgttgaaaaccatgtgtgcatatgcatatccgcctgtatcataacttattcctctttattttgtattttatcaatattctttatgtttcctacttatccgcaatgatcgttccgccgccaagtacgtattctccgtcatataatacgacagcctgtcccggtgtgatcgctctctgcggctcttcaaatgtacagaggatctcatcttctcccgtcttttcaacggtacaccatgcacctctgtgattataacgaatcttcgcccacactcttttcggctctgtcagatcttctaccgtcatgaaattcacctgatctgcgcgcacataacgggacatagattcctcatttgatcccactacaacttcattggtttccgggcggatctccaatacgaacaccggatgtccgagagacagtcccagaccttttctctgtcccaccgtataatgaatgattcctttatgttttccgacaaccgttccatccgaaagcacgaaattgcccggcgtaatctttgcatctgaattttcttcgatataagacgcataatctccatctggcacaaagcagatatcctgactatccggcttatgtgcaacaagaaggcctatttcatctgccattgcacggatctgatcttttgtatattctccaaccggcatcagtgtcttcgaaagctgatcctgtgtaaggttataaagtgcatatgtctgatcttttgccgcagtcgcagaattacgaattgcatatcttccattcgacagtttctctaccctggcataatgtcccgttgctatatactccgcaccaatatcaaggcttcgctttaacaatgattcccatttcacatatcggttacaggcgatacacgggttcggcgttctgccatgcagataatcatcgataaaataatcaatgacattttctttaaattcttttttaaaattcatgacataatacggaatatccagcgctgctgccactcttctggcatcatccactgcactgagtccacaacagccgccatgttcttccatcgcggcttcttcttcatcctgccagatctgcatcgtgactcctattacatcatatccctgattttttaaaagccaggctgccacggaggagtcaacccctccggacatcccgactacaacttttttctttttcatataaagttctccggcttaatattcttcctcttccgcctcttcaccttcgtgaatatcagacttcggtttcttgagtccttcaatcttgatatcatgcttttctgcataatcccataaagctgcgtggattgcttcctctgcaagcagtgagcagtgcacttttaccggcggaagtccatccagagcttccataactgctttattcgtaacttccatagcttcctggattgtctttccttttaccatctctgttgccatactgcttgttgcaactgcggcaccacatccgaatgttttaaattttacatcacggatgatctgattgtcgtcgatatcaaggtaaattctcatgatatctccacattttgcatttcctacggttccaacgccactggcattttcaatttctcctacatttcttggatgttcaaaatgatccattactttttctgaatacatatctaaattactccttttgtctttttatctaaatgttttgactgttttgtccgaatgtgttctgtacacaatctgaattatttctcgccctgttttttctgttttttaatgaagtcttcatacagaggagacatttctcttaagtgcgcaacgatctctttcagattatctacaacataatcgatatcttctttttcaatttcttcgttcaatgtcagtcttaatgatccgtgagcgatctcatgaggcagaccgatggcaagcagaacgtgtgatgggtctaatgatccggatgtgcatgcagatccgcttgatccacagattcctttcatgtcaagtttgatcagaagcgactcaccttctacgaactggaagctgaagtttgcattatttggaagacggtctgttctgtgtccgttcagacgacagtatggaatttcattcagcactctgtcgatcagatagtctctgacttctctttcttttgctgttctttcttccatgctggctgctgcacgttttgctgctgttccgattcctacgattccaggaacattctctgtacctgcacgacgctttctctcctgtgctccaccatggataaacgaacggatctttacgcccgtacggatgtacatgattccgattccctttggtccgttgaacttgtgtccgctggcgcttaacatatcaatatggcattcgtctacattgatcggaagctgtccgaaagcctgtactgcatcggtatggaacagaatgccatgttcatgagcgatctcaccgatttccttgattggctggatggtaccgatctcgttatttgcaaacataacagagatcaggatagttgtcggacggatcgctgcctttaagtcatccagttttacttttccgtcttcatctacatcaaggtatgttacctcaaatcctcttttttcaagatactctgctgtatgaagaatcgcatgatgctcgatctttgttgtaatgatatggttacctttgttcgcataagcctcggctgtacattttaaagcccagttatcagattcagatccgccgcctgtaaaatagatctcatttgattttgcaccgatcatttcagcgattgcatctctctgctggttgatcacttctttgtttgcagcggcaaagctgtaaacactggatggatttccgaatttttctgtaaaatacggaagcattgcttctacaacttccggtgctgtctttgttgttgctgcattatcaagatataataatttactcattttatctcctccattttctttgtatattctgtaatgtttttgtttatcagaatttttgtctgccgattactggctgcactttggattttcacattctccgtccggattaatgcttttactctcctgtatcagctcatccagcatgatctgattcaccgtatcattaatactgtcattaatcttctgccatacatactttgtcacgcatccgtccgatgccatgcagccttctcctgttgtagtatcaaatgccgcacatttgaccggctccagacttccctccagtgctcttaagatatctccgacagagatttccgacggttttttcgccagtacatatccgccagaggctccacgaatacttttcaccagccctgcctttttcagaagtgcaacaagctgttccagatagcgttctgaaatttcctgtcttgcggccacgcttccgatcgacaccggttctttctcactgtatctggcaagatctatcatggcacgcagtccatatctacccttcgtggaaagtttcatcttatcacctctttttaatccccagtattttactaggatttttactcctgtagaatatcactgctttttagttctgtcaagcactattcttgaataacttataaagatacaattctcatatataaaggagccgattatgtccggaaagcgcgctctcatccgtggaacagctattttgaccattacaagttttgtcacccgttttatgggatttttctatcgcatttttttgggtcatacctttggcgaagaaaatgtaggcctttatcaacttgtatttcctgtatatgcccttggcatctctttttcctgtgccggaaccgaacttgctctttcccgctgcgttgcacaggaaaatgctgcaggccatccggaaaaagcaaaagaattattaaaaaccggcctgatatttacatttgttctttcctgtattctgaccatttttttacagcacaatgcacatatgaccgccatctcttttctccatgattccagatgcgaagaactgctgattttattgtcctatacgtttccttttgcttcaatccacagctgcatctgcggctattcgcttggcttaaagcagacaaaaattcctgctgtttcccaactttttgaacagacattccgtattttattcgtgtttcttttctgttattaccgcaccagccatcagctggatctttccatctcttttgccgttgttggtcttgctatgggggagatctttgcatcttgctattgcctgtactctatacaccacacagcttcgaaacaagtgcagaatttgctttctgcaagtactttctgcatccatctttccaggcttttcagacacgcctttcctcttactgccagccgggtattattgaacattctgcaaagtatagaagccgtatccatccccgtttttcttcagtattccggaatgtcttcttctctgtctttgcaggtatatggagttctgaccggtatggcacttccttgtattctgtttccttctgctattaccaacgctgtatcctccatgcttcttcctacagtggccgaaattcaggaaatgaaagagaagcgcagacttcaggctatcatttcaaaaatcgcttgttcctgcatatttcttggatgtttctgttgtattttcctgctaatatccgggaaatggattggaatctttctgttcaaaagtccgcttgcgggtagttttattctcacgctttcctggatttgtccgtttttatacactaacacggttcttcttggcatgatcaatggtttgggaaaaactactttttcttttattattaactttttaagtctttgcatacggattgcaggtgtatgtctttttatacctatatggggcataaacggatatcttacaggtctgctgatcagccagatctttttgtttttgtgctgtatacttcgtctcgtaatctacataaagaatttttcataaaaagatcgacacacagtatctttgaaacatttcatactatgtgtcgatctttttcgccatacgttcgtaaggagctgccagtggcaggtcctgtagatcacctacaatgttttcagaaacattctgataatgacaggattcacataacattctgttatcattcccaacagcaccagcattatcagttttatagtttttccggaattccacctgaccacaggatattccagcatatattcaaacaatagtatcccggacaaaatatagaatacgccctgtggcataacagcaatcacacaaaggacaatccctttaattccaagtctggcaatggccgcacagatcaccatcccaacgcaaaaacccagccatattactgttaatatcaccgcactttttctataccttgttccagctgccgccgtaagaatcagtagaaatacccctctgttttttatcaggtaccagaaatactcctcatatacaatctctaaccggttatattgttccagaaaaaactgattaaaaattccaatgtcgagtatatactccttcatccagagattcgcactgcatattcccagtacaaatcctgtcattccagccagaagcacatatttttgttttgtttgtatcttcacatatcattctccttttttcagattcagatatcttattatatgtgctctttgggtggatatgattttatccgtgcagatactttgattcatatgcaaggattgctgccatagtttttgaatcctgtatctttccttcaaaaatcatctgtttcaactcatccaattcataagcttttacatccacaaattcatcttcatcaaggctttgctctcccggtatcagatttcttgcgacaaaaacttcgattctttcatcgcaaaatgcaaccgttgtccgaattgtaagtatccattccagattttcagaactgtatcccgtttcttcttttagctctctcgctgcgcatacaatcccctcttcattcggatcatccagttttccagccggaatttccaatgtgtctcgttccaacgcatttcggtactgttttaccatcaagatctttccatcctccataaccgggataactgcagcagcgccgtcatgatgaataaagtcccattcttctgtatttccatttgaaaatttcatatgatccttgtatacttttaaaaccgttccctgatacgccagatctcttcctgtacgtattacatcttcactcattcttacttcctcctgctattctttcaaaagtatcttttttaactccagccactctacaggatctgccacctgtagaacttgcccgtggcagcatctttcggatgttttggtaaccggctgtttctcatacatacttttgtacacaaaataagaaccggttgaccaaaaatcaaccggttcctgtcatttcatttatcttctacttggcatagtctgtaactcgtgattcacgaattacattaactttaatctgtcctggatattctaattcaaattcaatctgtttcgcaatatctctggccagtaataccatatctgcatcagatacttgttctggaactaccataacacgaatctctctacctgcttgaattgcaaaagatttatcaacacccttgaactggttggtgatatcttctaattgttttaacctgtttgtgtatgtctctaatgtttctcgtcttgcgcccggccttgctgccgaaatcgtgtctgcagcctgtaccacacacgcaatcagagtttccggttctacatctccatgatgtgcctctacagcattgataactgtaggagattctttgtattttctacaaagatccacaccaatctgaatatgtgatccttctacatcatgatcgatcgatttaccgatatcatgaagaagtcctgcacgttttgcaagtctgacatctaatccgatctctcccgcaagaagtccggataactgtgccacttcaatcgaatgcttcagtgcattctgtccatagcttgttctgaacttcatacgtccgagaagtttaatcagttccggatgaattccatgcacaccgacttccagtgccgctgcttcaccctcttcacgaatcatcgtgtcaacttctttctgcgccttttctaccatctcctcaattcttgccggatggatacgtccgtcaacaatcagcttctccagcgcgattcttgccacttctcgtcttatcggatcaaatccggaaaggacaactgcttccggtgtatcatcaataatgagttccacacccgtcagtgtctctaaagtacggatattacgtccttcacgtccgataattcttcctttcatttcatcacttggaagctgtacaaccgaaattgtagtttccgcaacatgatctgccgcacatctctggattgcagttacgacgtactctttcgccttcttatctgcctcttcctttgcctgcgcttctaattccttgatcatctttgcagtgtcatgttttacatcttcttcaacagtttttaacaaatattcttttgcctgttcggaggtaagtcctgagattctttctagttcctgtacacgctgctgactcagctcttctactttcgcttcacgctgtctcagctcttcttccttcgctgtaaatcctgcttctcgtctttcaatggcctctgattttttatcaagagtttcctctttggaaagtacacgcttctcgtaacgctgcaattccgatctgcgttcctttgtctctttttcaagttcgttcttattcttgatagactcttccttgatttctaaaagagactccttcttcttggcctccgctgtctttactgcatcatcaatgatttctcttgcccttgcctctgcattaccaatcttggattctgcattgttcttcaggtttgagactgtcaaaaaatgactgatcacagcggccacaacgataagtacgactgctacagcaatcactattcctatcggcacaggagcacctccttatttaattttcattgtacgattattacaacagttcaattttatactttttacacaaatatgtcaagctttcactcgcaaacttgtaacacattgcgaacatcctgataactgaatcctttacgcatcagatagcccatcattttctgcttttccttcgcatccgctgtttccgggttataatttcgtttccgcatcagcgcttcgatcgcctgtctggaatcttcttccccgtagtccgcttcttcaaatacctgttctacaatttctgatgaaacgcctttttgcacaagtgccgcatagagttcttttttgcttttccgttccttcctgctgtcaataaaacttctcgcatattccacatcattaatataaccaaatgacttcacataccggattgccgcctcaactgcatcttccgtataaccgccctgtttcaatttagtccgaagctgcgattccgttcttcccatatcagaaagcagatgcattgcccggagtttcgcccttttagtaataatctgctgaagactgtcatagatatcgtcttcgatcacagattcttccgctatatgataacgggacagttcgcccttatacaatgtaaaagcaaactgtccgtctaaatatactttatatctcgtctttgacagcggttcgatcttcgtaaccgtcatcatagattattctccctcttttgtaattccttctgcagcttcttcgttctcttccacgtcaccttccgctccaatgtgatagtgtgcacggatcttctgctccagttcttccatgatctccggatgttcagaaagatatgtcttcgcattctctcttccctgtccaatcttgtctccattgtatgcgaaccaggcaccactcttgctgaccagatcacacttcactgcaagatcaaggatatctccttctttggaaattcctttaccgaacataatatcgaattccgcctctttaaacggaggtgcaatcttattcttcacaatctttacacgtgttctgttaccaaccatctcaccgctctgtttcagagtctcaattcttctgacatccatacgtacagatgagtagaacttcagcgcgcgtccaccggttgttgtctccggattaccgaacatcacacctactttctcacgcagctggttgataaagatgaccacacagttggacttgctgattaccggtgtcagcttacggagtgcctgggacatcagtcttgcctgaagtccgacatggctgtctcccatatctccttcaatctcctgctttggtaccagcgcagcaaccgaatccactacgatgatatccatcgctccggatcttaccattgtctctgtaatctccagagcctgatctccactgtccggctgtgaaatatacagctcatcaatatctactccaatattcttcgcatacacaggatccagcgcgtgctccgcatcaataaatcctgcaataccgcctctcttctgcacttctgcgatcatatgtaatgcgactgttgtcttaccacttgactctggtccgtagatctctacgatacgcccctttggaactccgccgagccccagtgcaaggtccaggcttaatgatcctgtcggaatcgtctcaactgccacctgtgctgccggatctcccagacgcataactgttcctttaccaaaatccttctctaattttgcaattgccgcatctaatgcacgcttcttatcttcatttgccattataattctccttttccgttcaccgaacgagtgttcgttctctggttaatatagtattatacttcatcccgaatgtcaatatttaattttccctcattacttttcttttgtatatctcggagtattttacagaaatgtaaaagaatacaaccatctgtgattcagatatacttaacatatcacagatgacttccgggcgtcaagataatctcatccctgatccgcatctccccagtctctttcgatgaactgtgacagcattcttggcgattccatacaaagtctgtcctgcgcttccacatatacagctaccgccaaatttccatcccatccaatatcctccttttccctgtccatacggtaaatgattttcttcccttctgcacattcaaattctatctgatccagatagcggattctgaacataccatattcgcacattttccccggaacaaccgattttttccattcgcggcattttcgtccggcattccatctgctgattacatagatcaatataaataataaaatatctgctcctacagtcaaaagtgctgtttcaccctctaaaatcaaacatattatcacaagaactcctgtatttgcaaaaaataccggcccgattcctttcatatgtttcctgacttccttgcgatatttctttctgcaatattttttcgaagcaatatatcccattttggtcaatttcagaacattctccttatttactgtttttccttcttcccgttctctccattccgtctcgaacctttccttttcgtctctgttttcctgttccgctcttaagctttttctctcctttttcagtctttcttcctgtttgattttttcaaccggaaccccactcagacttataaccatttctccaaacatgtacaaataaaatcctatacacagcatatcagaccatggccttccggacacgtgctgtctccacacgaatatgaccattgatgcatataatcccagccctaatatagccagataataatagtatgtaacgatttttcgctcttctagtttttgttttcctttcatgataatccaacaaagctccagtgcatatgcaagaaacaagctcaaaagtattacacgttctcccggtctttctttgattccatttttataccactgcgtggttctgccatctacttttgcgaatacttctcccagaaacatatcggcatcaaaagaatgaatctcaactttcattccttcccggacatttttcaaaccttttaccctgtaaaatatttttttcgtcccggtttctgtatcttccactgtaacatgccataccccgtcatctgcatctacacgccacaccggatctgccttcacacattccacaatcattccttccgtactctgatatacaggattcatgattcccggcatcagtatcaaaacaattcctatcaagaatcggacgcctttaaaaatagtcgtccccatactttcatcggattctacttctccatatctgacatctaattcccaaaatttattcagttttataaatgataccgaaaaaagcattaccacaacaattgtcagataatacatacatctgttatcaaacatactttccttttatccttcccatattttatccatatatggtaaccgttcaagtctcatctccattgccgtcggcataaaaataaccataactgtttctccgtcttttaccttcgcttcctcgtccagattcattctccatatttcatcatgtccgtcactgcatctgaatttcatattctcaaacacgtcttcttttatgcaacaatattcacacgggacccgagattccatctccattttataggattcccacttctttccaaatatttttgttccccatattatcataaccagtgcaaaaataattcccgctaccacaattccccagatacttgcatcactccccgaacctaaggtaacaagccaggccaaaaaagcactatctaatcccacaactacacatgcccacttatcaaacctgacctctttcattccatttttatatctgtaccggcaatatctttccgagctgctgatactcatctgctgcatctgatgtacctgataagaaatttccttgtactttggactttcctcttctgtatcagaatcctctccttctatatgccatatatatctgacttcctcccatagcttccagttagatccaacatttgcctgccatgccagcctcatttccgcaatcacataaaggatcagcataatgacctcactccagctcaataccctgccatattgcggatattttatagccgccagtggaacaagaatcgttaattcagctaagaccgctgcaaaccagaaccagcgtcttccttgtttcctttttccatgtttcacatactcccttccggatatgatcagcatttctattgattgaagcattaacaataacaatactgtctgcgtcttcacatttttatgttccattattttcttataatattctggagttttaccatcaattctggaaacaagtgttccgtaaaatgaagaccggtacgcatctattcttacatgcattccctttttcaatccgattcctgacacaaccttttctatgggccgctccctgccgtacaaggtcacttcatatatatcaaaatcatcatactgcgtaactgtatcaatcagaacaacatcttttatcacgccctcctgtatttccatcgtacggttacaggtatccagtaactcatgcattctccatccataaatacttaatgcagctagcaaacacgcgcaaatccagaatacatttacatatatttctatcgtctcttctactttaaaccatatatttctataccaccagcccgacagtacaatccccatgcctgcaattatcattatatataatgttatgcttcctcttcccatgctctctcctgtatatctcttatcccaaatatgatttcaatgtatcattccccgataacaatgtcaaaatatttttcaggtctgttaagccagatgccgtcacccccttgccagggtaccgcaattcaaagcatcacactttttataatccagaatatacaccatgaaaaatcacgttttgctactgccttttcgtttttcaattcatattctgccaccttatatccatctaaataatatgtcaacattccaatcttttcaccttttttcaacggtgcattccagtattttgcaagttccagctttgcccgcaattcttccccgtctctcataaggattttagagttttcttccgccggtctctcaattttcacaggaacattcaagcaatactgatacggctttttatcatccacgccaccggcaacttttatttccggtatctgcatttttttatctatatcccgatattgataatgctccagtccatactccatcaacctcctggtatctttccatttatatcctttattatccggccatccgcatgccagaagtgccacgataaaggtacgctcatcccgtcttaagcttcccacataacaatatcccgcctctgccgtaaatcccgtcttgccgctcagtgccccgtccatcatatccaggaatgcattatgattatgacacgaaaatgtacgcttcctgtcagcatcctgaaactgatattccttcgtccgggtcacttcaagaaatgtctccttttccccggatgtcataatacagtaccgcatgatcttcgccaggtcttccgccgttgtagaatgtacgccgccttcatcttccgcatccagtccgttcggcgtaatgaagtgggtgttcttgcagccgatctctgcagcttttgcattcatttcttttgcaaattcttctacacttccggcaatgccctctgccacagccacagcgctgtcattatgcgattccagcatcagagaatacaacaggtctttgatgtagaacacttcccctttctgcatcccaagatgtaccttcggctgggacgcagcctgatccgatacttctatcgtctgatccggatgttcccgcaagtattccaacgcaaggatacacgtcatgatcttcgttgtacttgccatcggacggaccacatctgtatccttcccgaacaatacccggccgctgtccgcatccatcagcaccgccgatctggcataaagttctgccggttcatccccgaacacccgcttcgcattctgtgcagcatcatcgttctccgttccattcgtctgcttctgtgcctcttttttccccgattcggtcagaatctttccggcagtctccgtattctctgtccaccttttattccttgattccagactctgtatacggcatgccatgcccatgccggcaatcaataccaccagcaataccaccgatacgattttatgcggccgtcttttcatatttctccactccgggtatattccgttaagaaaatatatgcccgaaaaaacaaaaaaatcactccaccggctgtctgccgcgtgaaatgattttccatgttatttcctgccacatcttctatatatctaattttaactgtacttcttcttccgcttcttctttaaacgactctacctgttccggattcggacttggaaggtcatccaatgaatgaatactgaaccttcgcagaaattcttccgttgttccaaaaagaattggttttcccggagcatccattcgtcctctttctgatacaagattatattctaccagtttatttaccgcatgatctgacttcacaccacgtatcttttcaatctcaagctttgtaactggctgcttataggcaatgatcgatagtgtctcaagtaaaacatccgtaaggacatgcttcttcggctgcgatgccacacggatcaaatattcatacatctccgtcttcgtacacatctgatacgcaccgtccaattctatgatgcggacgcctctgtcttccgccacatatttatccatcattttatgtattactttacgcgtagtttcttcatcctgttccagcgctcttgcgatctttccgatctctacagaatcccccattgtaaaaagaatcgcctcgatgatcccttccatctgttttatttttaactttgccatgttatcttccttatatttcttcaacttttgatgtaatcataatctcatcaaatggctgatcctgctctataaagatcacgccttccttcatcaactgtaagattgcaagaaacgtaacaaccacctgtaccttggagctttgcttttttaatagcgcccggaatccaaatttcctgtgcgacctggcatattccgtcacataatcaagcttgtccggaagtgttacttcttctttctcaatttttccaaatttacttcgtaccggatcaaccttactttcctgtcttttcattacttctttaaaaatacggttaagctgcaccagtgtcagatctcccagaagttcatccaagttcaccggcggtacatatccttttacctcatccggaatcgtcgccgacttatacataacccggtcaccgtccagttcacggtcttttagttcatatgacatgaatttatacatcttgtattccagcaattgttctaccagttcctgtctcggatcctcttcttctccttcttcattcacttcttttggaaggagcattctgcatttgatatccagaagtgtcgctgccatcacaagaaattcactcataatattcagatcttctttctgcatggctttaatatattccatatattgattcgtgatctcgacgatcggaatatcgtaaatgtctattttatttttttcgatcaaatgtaacagcaggtctaacggaccttcaaatacctgtaattttaccggaatccccatacatatcctccattatcataacttaattattatacaggacatttggaaattactcaagtctttatctttcatttccggataattccagaacaatcagctccggccagttccacagtcttaacggcaccgaatgcgtcccaagtccgcggcttacaactgctgtctgttctccttccgggtaaattcccccggaatactttggaaacagtgtaaaattcgtcgaaatgactccaccgatccccgggagttgtaccacacagccgtgataatgcccgcccaggatcagatctgccccatatgccagatattctttcatatatcccggatgatgtgcaagcaggatctgataatcatccccgtgttctccgatacggtctgtgatttcttttaacgaaagttctttccttccaaatcttgcatacgctccaagcgggatctccaggccagaaagtttcacaggcacttcttccaattttactgtctctgatgcattctctaacatgtggattccagatgccgtcagtgcttttttgtactcttcataagattgttcatacttatccggcagttcttttaatttctgttcatgattaccatttgcacaataaaccgggcagattcccggcagttttgcaagaaaatgaaccgtcttatcataagaatttccatcctttctgaccagcatatcaccgccgatcagaatcagatccggatgctgattccgaatactttccagcaggcgttcattctcttctccatacatccggttgtgtagatcgcttaagaatataatctttttttcccttttgattccatttaatttctgtgagcagatccgatacttcgtcacgcggaaatcccgcagttctcttatcatttctatcaggcagtacactataaaaactgccacaattatcagaattatttttatcaatttctacttctcctttacatccgggtttattatataattctttctgttcattttcaattaattgtgctaaaattcattcttgtaggttattcaattcattataaggaggtttttgttatgaatataccagaacgaatctccgctcttcgcgcattaatggaagaacgaggatatgacgtctacatggttcctaccgatgattttcatcagagtgaatatgtcggcgatcattttaaagtaagagaatatatcacaggatttacaggttctgccggaactgctgtcttcacaaaggatgaagcaggcctctggactgacggaagatattttcttcaggctgaccagcagttagccggaacaggcgtaaagctctataagatgggcgagcctggcgttcctacagtagaagaatttattgcttctgcattacctgaaggtggtacactcggattcgacggacgtgtcgttgccatcgaagagggagctgcactggaagaagccgttgcttctaaagatgccaagatcaactattccgaagatcttgtcggagaagtatgggcagaccgtcctgcgctttctgaaaagccggctttcgcactcggcgaagaatacacaggtgaaagtacagagagcaaacttgcacgtgtccgtgaggctatgaaaaaggcaggtgccgatgtacatgttatcgctgcacttgacgatgtatgctggatcacgaatttacgtggagatgatgtagatttcttcccattattactttcttatgcagtcatcacaatggacgaaatgaagctttacatcgatgaacgcaaattaaatgacgatatgaaagctgatcttgcaaagaacaacatcaccatccatccgtataatgcaatctatgaggacatcaagaacttagacaccgcatctacggttctggtagacccgaaccgtctgaactatgcactgttcaacaacattcctggcggcacaaaggttgttcagcaggtgaacccgacgattgcaatgaaggcaaagaaaaatgatgtcgagatcagaaacatcatcaacgctcataaaaaagatgccgtagccatgacaaaatggatgtactggctgaagacaaatatcggcaagatcgagatcacagagctcagtgctgctgccaaactggaaacattgcgtaaagaacaggaaggttacttatggcagagctttgaaccaatctgcgcttccgctgagcatgctgcgatcgttcactatgaaccgactccggagacagatgttcctctgacacagaacggattattcctgaccgatacaggcggaggatacttagaaggttctaccgatatcagccgtacttttgcatttggcgaactcacacagcagatgaaagaagatttcacaactgtattacagtgtaacttcaatcttgcacatgccgtgttccttgaaggaactaccggatacaacctggatgttctggccagaatgccggcatggagacgtggcatcaactttaaccacggtaccggacatgatgtcggatatctgatgaacatccacgaggcttcctgtggattccgttgtgcgatccgtgaaaaagaacaggctcctctgatggccggacttgtcatcacagatgaacctggtatctatattgaaggcagccacggagtccgtacagagaacgaacttctggtaagaaaaggtcctaagaatgaatacggacagttcttatacttcgagcctatcacatatgttccgatcgatctggatgcaatcattccagagatgctgacagatcaggaacgcgagcagttaaacgagtatcataagaaagtttatgagattgttgctccgcatcttaatgatgaagaacgtgagtggttgaaggagtatactcgggctatttaatcttgggaaccggactcccggacctccacaaaacttaacaagccatttctgttcagattccgtcggcaggaaaatctaaagggacaaaattctgctaaaaacagagttccgaaatctgaaactcggcatacgcctcaaacagtcaaatttcgaacctctaacgcagaattttgtcccttaagattttccaacaacaacctatttcgagcatatactgcttttaaagtacatactcttccaacacattctctaatgcgcttctataattttgtttctcgatttcttctgtcgtgatgatgtctatggatccgattcttttaccattcaggtaatacattgtttcacccactttttcacctttttttaatggtgcttttacattcttatcttttctggttttattttctatctttgtcaaatctgcacctgtggtgtctacataggtgaatgcaccttgctggcgtacctttacctgtttttctctgccacccctgacttcaaccggtgatatcttcttttgtttcttttctgtgtatttctgacatttgccgaaaccataattcaataaagtaatcgcgtctctgactctgactttgctgtcatctgctgccatgatcacggcgatcagatcaatatcatcttttcttccggttgcggatacacagaatttggctttactggtagagccagtctttaacccggttgcatactcatactgacggatcagtttgtttgtattcgtaagtccgaattccgattcgcccttttgggttttatgtatgatattctccatccagatgttacagtaatcaaagatttgaggatatgtagtgatcagttcttttgacatcaatgcaatatctcttgccgttgtcagatgaccgtctgcatccagaccgttgcaatttacaaaatgtgtattcttcatgccaagatcctttgcccgtttgttcatctttgtaacaaattcttcttcgtttccgcagatgtattcggccatcgtcacacatgcatcattcgcacttgccacagagatgcatttgatcagtgtatctaccgtctgtgtctcccccggctccagaaatacctgtgagccacccatggatgctgcatattcagatgttgtcacttcatccccaagcttgatctgcccactgtccagtgcatcgaatattaacaacaatgtcataacttttgttacacttgcaggcggtaatttctcatccggatttttttcatatatgatctgtcctgttgatgcttccatcaggattgccgacggtgcactgatctgctcttgttgtcttttctcattctctgtattattttcttgtgaattttccggttgattctcttccgacggaactgcatatgcaggttgtaaaaaaagtacaaaagacattagtattgcgctgatacatcgtctatgccgcatcttttttgattcctcgctgacattttttcgattattattatcttactcggagaaattgtatattattccataactctattgttttccctcaccaaaaatcatataatagacaggaacactttttgaaaggatgacaaattatgaaatttatataccctgcagtatttcacaaaaccgaggaaggacattataaaggatatttcccggacctggaatgttgttatggagaaggtgagactctggatgaagccattgaaagtgccaatgaagcggcacgtgactggatcacactggaactttccgaagatgaaccgatgatcccatacgtatctgatattgaagatatcgaagtaaaagacggtgagatcgtccgcaatatctccatgaacatccgcttctacgaaggctgggacgaataacctgtgtataaaatttttgaatctgaaatttcttccagattatgaaaactcttctagtgtattaattatatttctccacatactatggatgtaacaacaaggaaaaagttacaaagttaccagaaggaggagtataaaaatggcaaatcgttcatcaaacaaagcagccgtacctgaggcaaagggtgcattagacaaattcaagtatgaggtagcaagcgaacttggagttccgttatcagacggctacaacggagacctgacatcaagacagaacggatctgtcggcggttatatggttaaaaaaatgattgaacagcaggaaaaacagatggcaggcaaatagtctgacaccgcctgcaaaagctagaaacgcagactggaaaattgcaaaaaatcaacacatgatttctattattacaaagttgtcatgtgttgattattttttgttatattcacagagtctgcacattgtggcttctttgttatatccagcggatccatctgcagtgatttcccccgttatgttatatcacaactcctgccgcattctcataattcggcagttttctgatccattcttcatcttcttccgtaagctgatctgcggactcatttgccatttgaaggatcttcgcatcctgatagatatctccaagcttgaaattcataagtccgctctggcggatgccaaaaaggtctccgggaccacgtagtcttaaatcctcgcttgcaatcttgaatccatcatttgagtgatttagaatatccagccgttctttcgtttcctttgattttgaggcactcatgaagatacagtaagactgatattttccacgtcccacacgtccccttaactgatgaagctgcgccagaccaaatcgttcggcattttcgatcatcataacggttgcatttggcacgtcgattccaacttcgataactgtggttgacaccagaatctgaatctcatttcttccgaactggtccataatatcgtctttctgtgcctgcttcatctttccatgcagacaggccacctggatctgatcacccatctcttcttgaagtgttactgtataatccgttacattttcggcttccattgtctcgctttcttctaccatcggacagatcacatagcactggtgtccttctgcgatctgttttttcatgaaattataggctttattgcgatatccggtatctaccacacagtttttaatcggaagacggttcgccggaagttcgtcaatcactgatatatccagatcaccatataaaataatcgcaagcgttcttgggatcggcgtcgcactcataaccaatacgtgaggttctccaccctttaatgcaaatgtttcccgctgttttactccaaatctgtgttgttcatcagttatgacaagcccgaggttatcatagcttacagccccctggatcaatgcatgcgttccgataataattttcgccagtccgcattcaatccggtcatatgcacgccgtttttctttcgctgtcatagaacccgtaagcagttcaaccttgatcgggatatcataatcttcgaacatcttcgttatattctcataatgctgccttgcaagcacctctgtcggtgccatcattgccccctgataaccattgaatgccgcattcatcagcgcaagtaccgcaacgatcgtcttaccggaaccgacatccccctgtaccagtcttgacattgtcttgtccgaaccaagatctttctcaatctctttccagactttttgctgtgcaccggtcagttcaaaaggcagattttccagaaatttctgtacctccggccgggactgcatcggataattattgtccagacgttcatttttctcctttagtcttcggatcgacaaaatgaattccagaaattcttcgaataccaggcgctctcttgcatgataaaagacttccttatcttcaggaaaatgtattcctctcaccgcataattgtattctgccagaccatatttcaaacgcagtgaatccggcaggatctctcttgtaagatccagaccatccagtgcctgcttcatggccttcataaccatgttgttggataatccggccgtcagaccatatacaggctgtaatgtatgcagcttctcttcgtattttgcagaaggatagaagatctccggatgttccatgaccagatcgcctgttttcttacggacgactcttccacgcagtgtgatcacgcctccgccggataacgtatttctaaggaagggcatacggaaccagattacttttaacgttccggtaagatcttttacatgaagtgtcgttacctgcatccggctgcttccggatacctgtacacgtccatagatcgcaccggtaactgtctgaatcttatcctcctccagctcactgatgggtactgcttcctcatatacatcgtatccatgcggataatagcggatcaggtcgcctactgtataaacattaatcttttcaaaaagcttcttcgtcttctctccgattccttttaaatctccgatgtctgtcttttctatcatacccttcttacttctcctatcttataactacaatctcacattgcaaaatcacttccggttcatgtatgcagagaaccgaacccatacacctaaagcattgtcacttccggtatataaattcggttctatacatatctgttccaattataaaactgaacagattttgttcatttataattctgcaccttgcttactctacagcaagaacataataatagatcggctgtccgccaaactgaatatccacatctacatccggatacagttctgtgatctcttctgtaaatttctcagcatcttcttctgatacttcttcaccataatagatactgatcagttctgaatcttcatctaccagattagcgatcaattcttttgtagtctcttccagatcttttccaactgcaagaattccgctgtcaccgatacccatgatatctccttcatggatctctttatcatcaatgtgtgtatctctgactgcgtatgttacctgtccggtctttacattcttgatctcttccagcattgcctcttcatttgtcttggcatctgcgtccggcatgaaattaatgattgctgtaattccctgtggaactgtctttgtagggattacaataatctctttttcttctaccagtgattttgcctgattcgctgccagtacaatattcttattattcgggagaataaatacagtgtcagcatttacccgatcgatagcatttaacatgtcctctgtactagggttcatggtctgtccaccttcgatgatataatctgctcccagttctttgaatatctcattcatacctgctccgatagaaactgcgataaatcccatcgcctttctcggctctgcaggcttcttttcttcgtgtgctgcttcttcatttgcctgctgttcggcaagtttctctgcatcacggatcagcttctcctgatgttcttcacgcatattatcaatcttcatcttggaaagctgtccataagtaagtgccttctggatcgcaagtcccggatcattcgtgtgtacatgaatcttgaccacatcatcatctgcaacacatacgatagaatctccgatagaacttaagaatttcttgaattcacgctcatcgtcctccgtaaattctttctctgtcagaatgataaattctgtacaataaccgaatttgatatctgcggtatcttctgcatttgctttatttaccgttacacctgtgcttggttcaattacactgtaatcaatctctttaccaaggaatgcatcatatgctcctttgatcacttccagaagtccctgtccaccggaatctactacacctgcttcttttaataccggaagcatctccggtgtctggttcaatacatcctgtgcatgctcaataacagccgggataaacacttccagatcatctgtttcttctgccatctctgctgcctttgtcgcaattccactggcaacagtaagaattgttccctctttcggcttcataacggccttgtaagctgtatctcttgctctctggcatgctgctgcaagtgcaagtacatcaatctctttttcttctttgattgcttttgtaaatcctcttaaaagctgtgaaaggataaccccggagttacctcttgcaccacgcagagatcctgaagaaatcgcctttgcaagatctttcatagccggtttgtttaatgctgttacttcttttgccgctgacataatcgtcatagacatattggttcccgtatcaccatccggcaccgggaatacatttaattcgttaatataatcttttttcgcttcaatgttctgagcacctgcaagaaacatctttgcaagtatgtccacattaatcgttttcgtagccacttcttacgttcctccttaaatccacaaactaatcaatgactctgacgccttcaatatagacgttgatcttatctacctgcatgccggagaattcttccactctgtattttacatcactgatcagattatctgttacagcggaaatacttacgccgtatgccacaataatgtggaagtcaatactgatatggttatcatcacttatatttacatggattcctcttgtcaggctttccttctttaacagatgaaccagtccatctttcacattcacagctgccattcctactataccaaagcattctacagctactgttcctgcatattttgcaattacttcaggatcgatcgtaataattcctaaatctgtactcatacatcctttcatagccaaaacctccacttctttcattatctatcaaaatcaaaacacaatatattttattataccctgttctatcttcaattacaatagttcttgttgcgcaaaaaaactcagattccacacagcgaaatctgagtttcaatacatcttatgcacgctcaacttttcctgatttcaaacaagaagtacaaacatacatcttctttgtagctccgttttctgttttcacgcgaacagattttacatttgatttccacatctttggtgattttctatgagagtggctgacattgtttccaaagtgagcacccttttcacaaatagcacattttgccatgactgcacctcctaacgctcataataagttctttgtccgaactcgcaacaatagttattctagcagactgttgcaagaattgcaagagttatttaatatttttttgtttacattttatttttagcagcaaaacaggcaatatcccaccgcaatacacagaataatacacaggatctggcagaataagcccggtaagaccagagccaaaaccattcctgctgccacccagaacaacgcaaatcctacgattctcttcacagacacacacctgctttttgtacattatatgtatgctgcttcaaaaaattccggttatttttctgcttcgtccaggatcttattcacatcgtcttctgtaacattgtcttcttttctggatgtgaaacgatccatcacatccggaaccatatccaaaagcttagtgatcgtatcctgattcttgatattcacaagcttggtgtgaccattctgaatcaccagcactgcacttggtgtcatctttccaccgatacctccggcacctttttctttcttatctgcattgaacgcgcccgcacctaccgcaaatgacacatccaccagcggtaagatgatcgtatctccgatatggattgcatctcctactaccgtcttggatgacacaactgcgtccatcccatggaacagcgcctctacggttcccttaaaattattttcagccatcttttttcctcctcgtactatcgacttgtactgtctaatctatacttgttctgtttatattcgtctgatctatcatcggattataattgaaactcccggatatcatggtaagtctttcggatttccctgcaccacaccagattccacaggaaacaaaccagaggcaccatgcggaatcctccgcggacctttacatcccctttcaggatccttctttcaaaattcggttctatcgataaaaattctccgataaatgggtagattatactgaaagctgcaagtgcctgccctgtatggcatggatcctcgaatccaaaacgaacggtaccttttatcacttttggtttccagcgtttcagcagtttccctgtttcttttttggcctttgaaaaagctttctgatgtaccggatcttccagttcttttatgatcttatctttcttttctgacaaactctccagcttttcttccgcatgtccgactgtatgctttatcttatcacagaactttacaattgtacatttgatcttctcaaatcttccggttttttcttcctttttttctatcttatccgtcttctccggtttttcactgtttttttccggttgaactttttcaggtctctcatgagttttttgtaaaatgctttctgggcttttttcagtcttttttccggacctttcttccatatccttcgaagctgcctggccactttccacaattgttttttcttctgcagactctttttccactttcggtagtccgcgactgctttccactctctgttctttccgagtctcttcccgatctgtattttcttctccatgagttacctcctttttaggttcacttccaaaagatttccatgcaattcttacacgccattttagttcctgttcttcaaaggatacatctatccgtatcaggcgcaaaagccacgtcacgcgcccgcgtacggtactttcttttatctcgccgggcatcgacgcctccatgcggtatctgaccggaacacacaaaagaatcaccagaagtaaaagtatcagtccgagaagcaccgcaattatgatccctattatttttaaaatgatcaaaagaatatgtaacaccatcttatcttccctgctctttttctaatatataagaccgtatatcgcatgtacctgtctggtcatatacttcctgtacaatctgttctaccagttccaccgcttcatcatatcctttcgtgatccccaccacgaacagttcctgctccgggaatgcaggctgcttaaactgaattgtcggatagatctcgagttggtttctctcgctgactgccagtgtgatcacatgcacacctggctgcagtttaccggcttccagcttacggatgattttttcttttttcttttccagcccttctgtcaggtacagatgcttatagtatcgcatattttccgtccttctatacatttctttttaactatatctctcatgatatctgaccgataccagatcctaactctaacgataatacgaatcaaaaatctcttttgcaacatttaccgctttagcagttccatccgaagattcaataatcacgctgacaaccagttccggatcttctacattcgacattccaatgaaccaggagtgatctttttctttatccgaactgtattctgcggtacctgtctttcctgccgccgtataactctgtccacttaatacagaagccgtaccgtaatctactacactcttcatatactctttgatctgagacgcttcttcttcggtcataagctgcttatactcttcctgatccgtctctttcataactgcacccgatgcattcgttaccttgtcaaccagatacggtttcatcagctttccaccatttgcgattgcagatgtaatcaacgccatatgatacggactcacttgcgtctctccctgtcccattgccgtcatcatcttcgtgccattcccggctgaaccatccagtgtgaagctgctcttactgtatggaagatccgaaggcagtttagaatcaaacagaacttcctctgccgtctttttaaacttcgacgggtctaacgaaagaccaatattagaaaatgatgtattacacgaatatgccagactgtcctgcagatttacctgtccgtgaacatgtccattataacaatgaatcttaattccgctgttctcgatcgaacccgtacagttataagaataagagctgtaatccggattctcccgcataaattccagaagtgttacaactttaaatgttgatcccggtgcatactgtccctgcgtcgcacgattcagcagcacactgttcgtatctgaacttaagctgttccagttctcttccactgtattcggatcgaaatccggcttggataccatggcaaggatctttcctgtctttggttccatagctacgaccgcaccttttttatctcccagtgcctgatatgctgcttcctgaagatccgcatccaatgtagtcacaaccgtgtttcccatattctttttatcctggaattcattcttaagcttaatcagaaaattctcatccgatgtcagaagatcataatttcccaacgattcgattcctgattttccctgcacattgtaaccaactacatgtgcaaatgcgtttccgtatggatactctcttgtctcacttccatctgcagccgtatctgtcttcgcaagcacatttccattcttgtctacgatcgttcctctggtcacgcgctttgcattggaattctgtctcgcattatatggactgcgtatgatatcctgactctttttcacctgaaaatatccgatatatccaagcagcaccagaaacagtcccacaaacacataagtaactctagcgaattctttgtttcttgcgcgctttgccttgagccgcttcttttcgcgctttttggcttcttttcgctctttgcgggtcatattctgtctctcgatatcttgccgcattctcctgtcggcttctctttgctcgtaaccgttctttcttccttctctcaatatcctcttcctcgtcttctcttaaaatatacagtccctggataattgcaaacatgatcagtgtactgatcaacgaacttccaccataacttacaagcggaagtgttacacctgttgacggaatgaacttcgttgcccctccgattgtcaagaacacctggaatatgtaacaggtaccaagtcccagtgctaccatcttataaaacagattatgcagctgcattgcaatatttaaaaacattacatagcagcttacacagatcagaatcaggcacattgcatagatcagtcccatctcttccgaaatcgcagaaaagataaagtcttctgcagataccggaatcgtatccggctgtccctgatagagtcccgcaccaaaccatccaccggttccaatggcaaataatgactgtgccacctgatagccgccattatcataagttccgaatggatctctccacacattgacacgcgtcttaacgtgcgtaaacaaatgatatgccgcaactgctcctaagcttcctgcgccaagtccggcaagaatatacagtggttgatgggttgccacatacaacataaccagatataccacaaatatgatcagtgccgcaccaaggtctttcgataccaccaggatcagcacgtgaaaagcagctacgaccgtcgtcactacgagatctttaaattccgtcgaacgcttaaaactggatgctacaaagaacacaaatacgatcttcaccagctccgacggctgaatattgattcccgcaaccgtaaaaccaagcatcgcaccataggatactcttccgacaaccacaaccaccgccagcgatacaattccgacaattccataaaggattctccattctgataagaatcggaccttccggatgatgatcggaattacaagacaaagcacaattcccgctgctgcgatcagatactgcttcgccgctttatcataattcaatctggtgatcatgataaatccaatactcaaaagcatgcacatattatttacaaccagacgcgatacttttggataaataaaactatataacaggatggttcctccaagaagcgttacctgcatcagatataacgccagaatctttgtgtcctttttttccagatacatcacgagaaatgctgtcagatgcatcacgaacatcaacacattctgctttctgagacaccgtttctttttatccggatcataatacccgaaaatgctgaagcacagatatgtatacactgtgatcatcagaatcatcagatattttgataactgtacaattatatttaccaactcttcacctactttactcctcttttaaaatgtcctcttgtatagtcctgcatcggaggttctgtcttacaccctttttcgaatgcgagcgtatatgcatgacagatctctttcacctgtccgctgctttctgtcgtaaagtccagacgtaattctgcgggtgccaatgcatgtacctcttctgccttatcggctaggaacagcggagccgaattatacatcacattatagcagtctctgcaatatcgtctgactgcaaacttcttctgataacgatccgaaatcgaaagtacaccgccttttccatcacaggaagcactggtcttctggatacatcctgcactgatcatcaccggctgataaccatatgcgataaacacctgctcctctattccaattcttgccagttcacggtcattcaattccactgatgccgttccccgggcaattcccaatcgtctcaattcctcttttgtcttccgattaaatatataaaggttataatcactgcggatttctttctgatattcatgccgtttcagccacgcatagctttcccagttccggatcagaataccatcatattttttctcgatctctgtatacattttttcatatcttttgatcgtattctctctgaaaatatatggcatggcaaggaaatactgtacaccgtcttcccgttcaaattctacatcctcctccagatagatgtaccggattttgctgtttaccactgtatcaagctgagctttgttctgtacacttgcagatatacagcattcttttttgcctgctgtttctgttacaccatccgcatcgctatcgaatcccgctgttgctgttttcattccacaaccggcttcttcccgtctgtactgcatctgtatctgctccgtcagttcttcaataccttctcttcgcagttcattcaatgcctgcatcgtgaggaatacatttccttcaaccagaatctccagattatcaaatgtaaactctgtattaccggttttgcgcatctgcttttcgattcttgccggatctaacggttgcttctgtgccgcctgcacttcctgtccgatgcattctacagtaacatcaccgcatgatactgttagtttagcacggtttccgacagaaagtgttaaaataccattaattttttcttgtacttttatatcctgccatggcttttcctctgcacttccatctcttccattctttggacgcttcaaagataccatgtccttgccgttatgctgataatagtagccttcacaataaccacgtctctgataagtcgcaagtaactctcttttgtctgcctctgatacatgatacgaggatttccctttgccttctttctgaagtttcagatactgatctgcatatttacgatacatttttacaaccgtatatacatattccggctgcttcattcttccttctattttaaacgaatcaatcccggcatcgatcagttccggtaaaatgtcaattgtgcacaagtctttcagactcataagatccgccggtttctttccttctgtctgataaggcagacgacatggctgcgcacactgtcccctgttgccacttcgtccaccaatcatgctgcttagcagacactgtccggaataacaatagcaaagggctccgtgtacaaaacattccatctccagtcctgtctgtttcttcatatcacggatttcctttaaagaaagttctcttgccggtacaactctcgtaattccgtatctttttaagaagtctgctccaagtgtattggtgatcgtcatctgtgtactggcatgcaccggcatttcagggaaatattctcctataaacttaaccgcaccgatatcctgtacaatcactccatccagtcctgccttgtaataaggaagcaggtacgcatacagttcattcagttccctgtctttcaggagtgtattcaccgtcatataaatctttcttccatgaatatgcacatattcaattgcctgcaccagatcttcttccgaaagattctgtgcatatgctctcgccccaaattttgtaccgccaaggtatattgcatccgcacctgcggccaccgctgcccgcagacactccatcgaccctgccggagctaatatctctacatctctgttcatagtatcctatcctgtctttttttcaactctttctttttattccaaacttgtaaaaaaggctgtcatacgacagcctaattcttacttattattcttaatctctgtttccagctgtacgatcttcatctgaagttccttattctcttccttcagcttgtccatcgctttctctgcattctccagcttgatctgaacggatatcagttcatgctttaagtcatacatctctttatcttttgcctcgatatcactttccagtgtaccgccctgcttcttcgccttaaagtaatcatccgcaatgttcagcgccaacagaatacttctggtctctgcgctctgcttgcgatatccctcactattgctgcattcgtccagcttatggttcagatatgtagaaactttctgtaaatagtcttcactttcaaatccacttaaagtaaaaacctttcctcctattaatacttctgtatagttttttgatgatgccataagaagcctcctcgaactttcataatttctgataactattataaactaatctgtaagaaaaaccaactattttattcattttccttacaaattcccagatgggcatatgccgcatccgtcacgactcttcctcttggagttctctgaataaacccattcttcaacagatatggttcatatacatcctcaatcgtacccggatcttctccgatcgatgccgcaagcgtctccaatccgaccgggccgccgccgaatttcccgatcatagccagaaggatccctctgtccgtctgatccagaccttccttatccacatctagaagatccagtgcataatccgccacttcttctgtgatgtagccgttatatttcacctgggcaaaatcccggacacgctttaacagacgattggcaagtctcggagtcccccgcgaacgtctcgccatcgcatatgcaccattttcatcaatcccaacttccagaacctttgccgaacgtaaaataatcatcttcagttcttcgaccgtataatattccatcctggtcaccacaccgaagcggtcccgcaaaggcgctgtcagcatacctgcccttgtcgttgcccctaccagggtgaattttgggagatccagacggatcgatcttgccgaagcgccctttccgatcataatatcgatcgcatagtcttccattgccggatacagcacttcctccacctgacggttcaggcggtggatctcatctacaaaaaggacatccccttcctgcaggttattcaggattgccgccatctctcccggcttttcgatcgccggtcctgatgtgatcttcatatttacattcatctcattggcaatgattcccgcaagtgtcgtctttccaagtcccggaggtccatagaacaaaagatgatccagtgcctcgcccctcgcctttgccgcttcaatataaatcttcagcatttcttttgcttttgtctgaccaatgtaatcttccagaagctgaggtcttaaatgattctcgatcctgacatcttcttccagattctcagtcgtcataattcttctgctcatctgtctgccttaccttctacaacatatatttcagagactgacggagaacatcttccacactcatttcttccgtaatctctacctgtctgactgcttttaatgcctcggtattgccatacccgagtgcaaccagtgcctgtaccgcttctcctgtcatctcatttgccatgcctgcagatgtatctgccgtgttctgcactgcattcgcggcattctcaagcgcatcctccagcttcaacttgtcttttaattccagaatcagcttctccgccgtctttttaccgattcccggtgccgcctgtattgcctttacatcattcgacgcaaccgcaaatctcagatcatcgggtccgagtgccgaaagaatcccaagaccgcctttcggtccgatcccgctgacaccgatcagaagccggaacacacggagttcatccctggttaggaaaccatacaactgcatcagatcttccttaacatgcagatgtgtgtggatctttacttcttttccaagagccggaagcctgcccattgcggtccctgccatgtagattccatatccgacaccgccgacatctacaatgactttgtcttcttccattccttccagaattccacgtatatatgtaatcatagttcctccatcaaaactgtatattcttaattctcttcaacatttccgccgacacgatcccgatcaccagtccggtaatcagtcctgcgaccagaagcaccgagaaataataaccgacactgaatgtctccaccacaagcattgcaacgatcagctgccccacattgtggaacaccccgcccgccacactgattcccatcacactgaatcctttgctcttcttcaagagtgccattaccgtcagacttaacaatccaccggccaggctgtaaatgatactgaaataatttccaaatatgaatcctgacagtagtactctgaccacagacaacagatatacctccgtcagcttcatcttatataacgcgatcacgatcaccagattcgcaagcccgagcttcactcccgggattccgaaattgatagggatcagcgtctccacatagctgaatatcagcgccagtgccgtaaacactccaaaatatgccactctattcttcacaatgtccctcctaatttgccactgcatcgaattcactttcttcacttccgtctacctcaaccactactttattcggcagacagataatgctctcatgattctttgaagctgctttctgatgtacacacaactgatccggacagtctgcatctgtcatcttcgcttttccgttctttatcgtaagtatattcgtaccgccattgatcctaatcttctgatcctttgcgagcggataggttcctgtcaccttaccatccaccttcacagtcacggtatcagctccatccccgccggcaaattcatgtacaccgaaagctgcaccggcaatcaaaagaactgtcaatataagaaccgcatcttttttcttccaattcatacgttctctccttgtctactaacggtactattctatcacaagaaattgtcccattcaacaaaaaagaaaatatgtttggtttgcatctgttttttttcatgttatactacaagttatgtaaatacatgatagaaaatcatcaactacgaggttattagtattatgaaatgtaaaaaaaataatatcataaaaaaactcagtgcggttctcactgcctctgctcttctcttgaccggatgctccggcgcaaaaagcagtacacagactgatcaggatcttacttataccgacatgctctttgacactgtcatcaagatccagatccttgatcctgcagatgaaagtattctggatggtctgaagaaactttgcgaaaaatatgacacaatgttctccaccaccaatacagacagtgaactttataaattaaaccacgcaaacggtcagcccttcactgtctcttccgaaacggccaatcttattcaggagggtatccattacagcgaactttccggcggtgcctttgatctcaccattgaaccggtatcggctctctgggatttcaaggcagataaaccaacggttccatcttccgatgccattgcccaggccgtaagccacgttgattacacaaaggtcgacattcaggataacaccgttacactggaagatcccgaagccggcatcgatctgggagccatcgccaaaggatacattgccgaccaggtgaaaacatatctcaaaaagcaagggataaaacatgcgatcatcaatcttggaggaaacgttgatgtcatcggcaccaaacccgacggaagcaaatacaacatcggaatccagaaacctttcgatgaatccggtgaagctatcacctctgtacagttaaaagaccagacagttgtaacttccggaatctatgaacggtattttaagaaaaacggaaaactatatcatcacatcctggatccacgaaccggatatccgtgcgagaacaatctttacagcgtatcgattatcacagactcttctacaaaagcagatgcactcagcacaacctgctttctactgggatacgagaaaggaatggaactgatccagagtatggatggagtggaggcgatatttattacggatgatgagaaggtgcataaaattgggatttaattcaggaaggcatgattacccggacctgcataaaaagtaggaagctgttcctgttcaggttccgtcggtgggaaatactaaagcgtcaaaattatgctaaaaacgggcttccgaaatttgcaactcgccattcggctcaaacaggcaaatttcgaaaacccaacgcataattttgacgcttaactacgttcatatcctttttcctgtgcaacagaggaagtcagatattctttctttttcccaactttatatctgtattgcttttcccagccatctttttgagcagctttgaattcagtagctgtaaatcctttttcttctccattttttatgcagagatattctttttctgttttatactgccatgttccgttttcgttcagtggacggacggtaagcagaatgtgtgcatgaggattgtgtccatccgtatcgtgaatagcaaagtcagcgcacatgcccatatctacaaagttcttttgaataaaatcttttagaagagaaatattactgtccttatctaattcaacgggaagtgcgacaacaaattcccttgccagtcggctgtcttttgttttttctgcagcttccacagcattccagagttgttcacggtctttccattctggtgaagccatcggtggaagcaatacttcctgataaatgagtccatgctttctggtgtaatcatgctggatgccatcgtaatcattgtacatccggctgcagctcatataagcagaagctgcgacagcggaacgtccggaaccacggctgacaactttggcttgcatatgataaattgccatatctggcacctcctttcgatgttgcctgcaacagcggaaaatccctcggcagagcgcacgagccccgtaggggataccaccgcccgatttatcgggtggtgagtaagtgcgcccttcgggagtagaacttgtgcgtttacattcctcgtagccggattatcagctcccgtttcagggaatccaaatccatttctttaatatggggaacaatactttccaaaatggctccttcctggactaatcggtgtgttctggcatcacgttcttttttgcgatttcttgcttcggcttcttcttggcggtgtcttgcctgtaaaagtgctttttcttccggtgtcatgatttttttatctgccatatctggcacctcctttttatcagaagactgtagcggtttaagctgttgatgaactggtttctgtcttcaaaatgcattccggtaagggtatttagaatccgagagaagttggtcatcagtacaggaatgcctttttccagaagggcattggcaatgcagcctgcaaaaaaagattttccagtaccgacatcaccccaaataagaagtccggaagcgtttgatttcatctcttcccagttacttacataattgtgtgccagttttatttccggattgatgccgttatccctggcaaacgtgtagtcgtagagtgctttgtcctgtaagccactggttttaagatgctctatttccatttgtttttcatgaagttttctttgggcttcttcctgctcaaagatttcctgctggcatttacagcggatggaaggaataagaacttttccctgtaattcatgccggcattgtcttggcgtattgcatttggaacagtagatcaggtggtctgtttcgttaaaatattcatcaggctgaatctctctgtttggtgttatagcggttgctttttctgtaaattttgtcataatgtttcgtattcctcactttcgtaatttctttgccgggaagcaggatgatcctgtcttgcccaactgatgatggtagctgcgtggttctgatattgctttccggtagaagccatataaccggataagcgttcaatataatcctgccagtcagggattgtctgccggatatcttccagctctttttctgacagaaaaacattttgaaattttccatagggtgagagtggctccttactccctcttattgctaaattgttcttttttatctctttcttattaccagacagttttctgtctgtatcaggaaacaaacgaggaaggatatctgatcacaccgcaggaactgaagtgctctacctatcgaatcgaagaagtgaaagcaccggaaggatttgtaagacagggaagtgaagagtccttgtatgatggaacaacgattatttcaccattagaacagactacaaaaggaacatataaagaaaatccacagagtggtattgtaattacagtatcctcaaacactgcacatcagattgatccggatacgggagctgcgattgtagaggtagaacagaaaaatgacgaacaggtaggaagcctgctcctgacgaaaaagggagaacagcttaccgaagtaaccggagattctgttctggcaaaagtaaaagcactggtttctaaagtaagaaatgctgtatctggtaaagaagaaacaggtatttataaaggatttaaatatgaagaaaccggagtagaaggtgctgaattcgaagtatatgccaaagataccatctattcaccggacggagcgtatcggatctatcaatgtagcatttatggaacagctgtaaatatagacagatgtagatgatcacaaagataataaagcaggcagagtatataataaaaatatggaggacagaacaatggaaggaaaaagattataccgatcaagaaaagacagaatgatatgtggagtatgtggtggaatcgcaaaatatttcaacattgatccgacacttgtgagactggcatttgtactgatctcaatgggagccggatcgggggtactggcttatattgttgcggcgattattataccggatgatccggagaaaaattaaggggtatttctatttagttcatcatcgtggcttatcccggtccatgagaaagacttggtattatgtttgttgctggatgtcacgatgcagaagttctaaggcagtccgccttcccttattgttatctcatataactcactttcatataaaaatcgcactggctgctctttccgcaacagatactccctgaatccctgtttctctcttccaaaacttgaaagcggaagtccaacagccagaattacctctgtctttcgttccgctttccgatgcttgatttcttctgcaatggctgccaacgtcagcagataataattatcattggacgttttattcaggtggcagtaggaaagcttgaaaaactcggcgtattcggagatgactatgacacaccggacggaaccggagtccgtgactacattcatgtagtagatcttgcaaaaggacacgtaaaagcaattaactatatcttcagcaatccgggacttgatgtgatcaatcttggaacgggtgttggatattccgtgcttgatatggtaaaagcattcggcaaagcatgtggaaaagagattccatatgagatcaaaccaagaagagccggagatatcgcgatgtgttatgcagatcctgccaaggcagcaagagtgcttggctggaaggctgaaaaagggctggatgagatgtgtgccgatacatggagatggcagtcacagaatccaaacggatatgaaaaaatcttatcatttctatttcttatatgcaattttcaaggtacatagatgataatgaagattcattatcaagtggagaatacgagattcgaactcgtgacctcctgcttgcaaggcaggcgctctcccaactgagctaatcccccatattcaattatttttaggcttataagtgggcttaagtggactcgaaccaccgacctcacgcttatcaggcgtgcgctctaaccagctgagctataagcccatcttttttagatttggcggccacctactctcccgcaccgtctccagtgaagtaccatcggccgcttaggtcttaaccatcttccggcattctctcttctatacagtccacagctccttatcggtactgcttcgtcccgtatacaatgctcctctaccaatgtactaggtacattcctgagcttcggcagtgtgtttcagccccggacattttcggcgcaggacctctcgactagtgagctattacgcactcagtagttcggaaagttccgaatccctaagtgctgaggtgctggcttatacttcggtgatacagcagtacgcatcccaatatggtatcccagaatatgtgtctgcgatacaggcgattatgatgcaggaatccgggggaagaggaacagacccgatgcagtgttcggaaagtccgtataatacaaggttttcacacagccccggttctattaccgatccgaattattcgatagaggtgggagtacagacctttgcagactgtatcagtcaggcaggatgtagcagcccacaggatctggacaagctgaaacttgcatggcagggatataactacggaaacggatacataggatgggcgttgcaaagaggcggatacacagaagccaatgctttacaattttcacaggagcaggcagcttcgcatggatggagtagctatggagatcccgaatacgttccccatgtgatgcggtattattccggtggtagcctgtttgctggtttgtttggaagtcagcagatcgtatcggttgcaatggggcagcttggaaacagtggcggtcagaagttctggagctggtatggatttgacagccgggtagaatggtgtgcctgttttgtgagctggtgtgcggacaaaagcggtctgatagcaagtgggaatgttcccaagttctcattgtgcagtgacggagtgtcctggtttcagggaaagaataagtggcagagtggtggaacaaccccgacagccggaatgatcatctttttcgactgggatcatgatggaaattcggaccatgtaggaatcgtggaaaaatgtgaaggtggaagagtctacacagtggaaggaaactccagtgatcaggtgcgacagaggaactatgcggtggattatgcctcaatcatgggatatggggtgataaattgatggtttctttcataatttgttaaggattttataagggagttaatgaatgctttggaaaatagtcacaaaataggcacagttgattgataaattgttattgtaacttttagtgatagacatataaagagttagaaatctttataattgacttgaattaggaggtagtgaatatgagtgatcagaatgtaaaagcagcacaaaaatatttaaatgcgatgtttggtggacataaggattgggtaaaactggatgaagatggaaagaccggaacagccgtgatgcagggaatcattcgtgcatttcagattcagaatggaatctcaacgatatacggactccaaggtcataggcctcctgcagcatttctacaggttttgttttgcttacggcgatcagagtaacttcatctcttttacgtccggcacggtcacatgcagcctgtatattttcttctactttttccagattttcttttaacataattgtccactccttttataatctgttattgtgtgtcaggatattacatcgccctcatgtacgtctttacccgtcagagcaatgtgatcataattggaaagtccgtagtcatcaccactttgaacaatataatattcatcgctttcgcacagaatctgtacctgtcggaatacggcataaccacggttaatattatatacaccttttaacttccgggttttgtttaactggcaggtatccgatgaatcaggctttctaagtgttgtattttcttcaaaatcatcaggatctatataaacagaaccggttgatgtatctcggtaatagatatcgactgattggaactgtgcattttccttttctttttcatttttatatggatccacgtatttttatcagttattcgttcacaggcttctattgcattgtctaaaagattgccaaacaatgatataatttcacgatccgtaaaaggaagcgttgtaaatacttctgtgctgatctgcatatcgatttttttatctttggcttcttttaatttctcattaagtatcatgtccagcatacgattgcctgtccagatttgataattgtaatctaatatatcctcgctaagttcatttaagtagtcattcagtccgatccagtcctgctcctgggaatatttttttaatgcaagcagatggtttttcatatcatgcacaacctttctgcttttcagcatttccttatattgtgcttccagggaatttattttcatttgcagtaatttcttatcacattcttccagttcggctttgtgctttgctgtctcatcatcccagatatttgcctgcatatctaaaaatatccacacaactatcaaagctaaaaatgttatcatgtaaaaataagcaggcatggaataaagctttatcaatccttcactgtgtgcgtccaacgcagcgagaaaaatataaaataccgcaaaccaggcgataccaatagctaataaatagttagaattattgataccctttatgttctgatatagtttaaacaattctaaacattgcacaagaaacattgcaattatagccagcaagaagattaatgctgccattcttgaatactgttgcggccatgtatgagttttcaagaatgtttgtatatatatgtctacataatcgttttgtcgaaatgcctttattaaatacatatgtattgtgttatatttcccatttatattgatccatgggatgcaaagatatatctgaaaaacgattcccataaatatgtctgctttttgtttccttgttctttcttttatggtgtatttctccaatagtttatgttttggctttttttgttttacggagtctgttattgtcatttgaaagggcttccttattattttgtgttaattttatacttaaatgattgggataattataccatgatttgtgtggcaacagttgcttgtggccatgaatacccggttttctggccatgaatttttcgaaatactctttataacaatttcttttgcctattttggcatctacaaaacctgaaattggaattgtgaatcttctacaactctttcatcttcccaaggatttcctgataaaatgcatcctgagttccgctattcttcaaatcctctagtattacaccatctttcaacagaattaaccgactgcaatagcttgccatnnnnnnnnnnnnnnnnnnnnnnnnnnnnnnnnnnnnnnnnnnnnnnnnnnnnnnnnnnnnnnnnnnnnnnnnnnnnnnnnnnnnnntcatgcgttaccatgacaattgtcttcttatattccgatgaaatcttattcaatgcatcgattacaatctttcctgactttgagtccaaatttccggtcggctcatcagcaagtatcagatcaggattattgattaacgcacgacatatggcaactctctgcttttcaccaccggataattcataagggtttttctttaacagatgttctatctgaaattgttctgcatatttctttgcttctgcaatcatcttattaatattctgtttgcttatgatcatcggcagcatgatattctcttccactgagaggctgtccatcagataaaaatcctgaaaaataaatcctattttactgttccggatatccgcaagtttatccccgtatagttcactggtatcttctcccataaatttaattgttccatccgtcggtttatcaatcattccgagtgtcttaagcaaagttgttttaccacatccggatttacccatgattccaacgaattcaccttctgtaacttgaaagctgattccttttaaaacctttacatcttcttcgctttcttttattacggattttctataatttcttattaaattttcaacttctaatacatttgttctcatcttttaattctccttcaattttcttaaaatatatctcgcgaagacctcttgaataatttcattaagtaaaatataactaacgactaatataatccaatatttgaaaaaaacatttgatattccaccagccagtttttgcttatgaatgaatgctcctacataaagaattccagttactaaactaacactctccgcaattcgtcctaatattttaatttcaaagaatgtgttccatttcaattgattctcccgcattcccatacacttaaagaattcatatcttttttgcagagcaggaaactccgtcaatgttttcaggctcataataaaaaaaccgcttaaaattaatgcaattatcaaaaaaattttactagacatactaaacaatgctctcattttttgactttttaaatattggtctgttatataaaggttattctgcaattttccaatttcatgataactagattttttgttatattgttttagtttttgacaaacctgttcacgtcttgttgttgggaaagtaaataattccaattcagacgcattatcattcttcagacttgcattccattgtttattaaaatactcatcggaaaatacaataatattttcatgccatccgtccgttgaatattttccaagtactgtttgtgtacaaattgattgtatattgaaatgtatatctttatttttctttacatcaattagtgtatctgaatcttgttttccaaaatatttacctgcatataatgtactatagccttcccaataagcagaatctttgatgtcttcttgtttttcatcagaattctctattctaacggctatttgattctcttttaaatttaacgccggcgattttgaaagctttctatacgttttctctgaaactccaatatgatttgccccataatatgtggatacacgcatcataggtacctcggttaatgttccattatatgtagaagctaatttttttgcgtattctttattgcccttttctgttatccagatcatgtcataaggatattggtttctatattgatcaagcggcaatagttcagccgtttgtacaacaaggtacgacaatgagaagaaatgaaccacaataagaagtatcaataaaatcatatggttcagatatctgctatataattgattcagatccagcatatatcgataataaaaattcttgcattttttaagcaaattcaagaataatgcaaggccaaaaactactgccaatattaatcccatcaataaaacaccatgtgcgtacaaatattgcgtgtctgaaccgcaatataaaattatgccggccatcatcaagacaattccaataactgccaatataatccacatataacttataggtcttttctcattctttttatcttctgccatgagcattccaagacttcgtccatctaaccatatcagcaatacaacaaataccaatatcatgattgagatacttcccaagcatacatttttataaatctgatatcttaacacatacatccgtatatattgaggataatactttactaataatctctggatgatataaagaagaattcttcctgttccaatccccaaaataagagaaataacacaaccaatacaatattcaaataataataaaaggctgacagcttttttcttcattcctaatataagaaacatgctataatctttaattctaagtttgatataacatttcatagcataaaacattaacatcaatgtaattacagcaataatacctactgcaatttgaaaatctgtttttaatgcttctgctgtaactttatctgtaatcgaatttttaataatcgaacgaattccataaaatacaaacagctctataattgcaacaatattactcaagaaaaacaaaatataattctttaaattacttcgaaaatttttatagattatttttgttaacatctacattcccctctccattttgtaatctgcaactagctactttgctccacataatagcatagttctactttacaccacatagtagttattgtcaattcgattacttatctattgtcatgttttctggctatgttataatattgataaatagattagaaaatatcaggtgatgcaatgtatgataaatctcaattaatgcgtggaacattagaaggatgtattttaaaaatattatccaaaaatacatcttatggttatgaaattgttacaactcttctgggttatggatttaaagatataaaagaaggaaccatttatccattattggttcgtcttgaaaaaaaaggaattattacctctgagatgcgcccttctccactgggtccaagtaggaaatattattccattacaccagatggagtagaatatttgaacgaatttaaaacaaactggaagcagatatcccaatctgtaaaccagatatttgagacggaggtataaaatcatgttgaataaaaaagatcaaagaatcatacggcaaatgatacgccatattcgtacatttcctttatcagattctgaaattaagcaacttgaacgggatcttaccggaatggctcttgaagctgaaaaacgtggagaagattttgaagatgttttggacatgaccccaactgaattttgtgatgaattgctttactctatcggtggcagcaaggctccaggtggtcgctatctgttaaaaggtgccggaatttattatcaattaacaggaattcttggaacagcacttttttcactaatcctattacttgcattattttatacaattataattccgtccgaacttgcacaaaccggattacttgtattatttgttgcagcaattggtcttactttctttttgctatctttatcatttggaaatatcgccgaacgcaattgtggcgcaaccgaaaaatctgcacagctcgtgaataatgggaagattttgttggtaacggcagttatctttgatatcgtggctactctttatatgatttttaatgctggagcgtctgtaggacattttaattataagcttccgcttcttatgcaggttattatctttttctcctgttatatgccggcaattctgtatattatcggtgcgaagaggaatctgccacgagagtacgttttaaatgagctatagtaatacctaattatatgtagaaaagtcaggaagattaaatataatcaacctgacttttttatcaaagattatgatcagtttctctcttttcctgctgggcnnnnnnnnnnnnnnnnnnnnnnnnnnnnnnnnnnnnnnnnnnnnnnnnnnnnnnnnnnnnnnnnnnnnnnnnnnnnnnnnnnnnnnnnnnnnnnnnnnnnnnnnnnnnnnnnnnnnnnnnnnnnnnnnnnnnnnnnnnnnnnnnnnnnnnnnnnnnnnnctgcattttcttttgaaaatatgtattctctagccaaattgtggtaaatgctaaacccttataaagctcgtaaggcactgacctctggcacaacaaaccttacttcttcgcttgacagacactcaagttgtctgttgttattattacaataaatttcatacaaatttatgtcaattgctctttaatataatacatcattttcttatattacaatttgcttagataattctctaattgatgaaaaatgccaactatatttacaatattttttcttacatcaaatatcacgatataattcatttgtggaataaccgcttcataatatcctttttttgccaaatacatatcccgacttttcggaaattggtatggattctccaccaatcggtcataaatactttctacactatctaacaaatgttttgcagcttctttgcttttcaggcggtaaatcaaatgatacacaagattatcaagtaattcgtctgcgagactgtaattaattctgtgtaaactctaaaagagctatatatcctcttggattgatgttaaaataaatatcaattcagtgacaatgctcgccttgtttccaaccttcatgccaatctcggtggactttaccgcatgaacggtcatcccgatcttgcaagagaacacatggaaaaaagtatctcactgcttgaccaatttaacctgcttcatataaatgacagcatacctcagattgccaattatgcaatgttcctgacagaacagcaggaacccgaaagaggaatctccgaattgcaaaaattatccggcatcatcaaggaataccattccgatccagatcttttcatatattttgaaagctcttttaaaatgtgttttggcttgcggaagattggcagtcattagataaatggttccaagggtttcctgtactttggcataatccagacagtgatcggaatggtattccttgatgatgccggataatttttgcaattcagaaattgataatctggaaagaagctattcaacagtcatgccggacggagagacaaaggtttattctgtgctaagaggaatttcatttcaggtaaaacgaggggaatttattggtattatgggaagttccggatgtgggaaaaccacacttttgaaaactatcggaatgcttaataagccaaatggcggaaaagtgctctataacggcgaagatacaacagaaatttatggagatcatctggcagaaatacgccggacgcaactggcgtttgtttttcaggatttttacttgatgaatagcttaactgttcgtgaaaatattatgatgccattgatattaaatgaagatgatcctgtggaaagttctaaaactgcagaaactatggcagaaaaacttggaatttacaagctgttagataaaaaaccttacgaactgtctggaggtgagaaacagagaacggcgatttgcagagcaatggcagaaaatccagaattgatacttgcagatgagccgaccgggaaccttgattctaattcatccaaacaggttatccatacattgtcctacattaatcaggaattcgggaagacgattgtcatggtaacacatgacccgcaaatggcaagctattgcagtcggttaattctgttgaaagatggtgtaatactagaggatttgaagaatagcggaaatcaggatccaatcaggttttaattattatcttttctttaattgtgttttagcttttggggatagaatggcaagggctgtgaaaaaagattataataaaaaagcattgcaatatgtctgcggaacatgtttgcttttttttgtctattatgtatacatgcaagatacaaaattgctttttttaagggatacatttacattaaatacagcaatgtatttcggctcgtcaattgtaaaaatgatagcaattatgtgtttgctgatgttctatttagaagacgaaaagattacatggaaaatggttctgggagtgtttggaatatctgttgtgatgatttcaaaatcgacgattgttttaccaacgctttttataacaggagtttcatatgtgatagttacgctgttatttactaaagaatggaagcaaaagattattggtataatattagctgcttttattgtgttagccggaatcattttgccgaacaatcagggggcgcagaatgaagtttatcagtatgtgttcaatgccttgaaatcaccgtttgtaataggagctcttgcagttttcggatgcagtttttttgcaagaaaaagagtaatatataaaattaataccatggttatcttaatggggctccttttcgttattccgcaattgaatgacatttcggaatttttggcagtgtatggatttgttgcgggacgtgcatggagtacatatgtatacacatttttgataattaatttgtggtatgtatatctttttatgagcaaaatattaaatgagacatgtgttaagattatttttattgctataacctgtggaatggttcgactgttgttttatggatatgaaacagatggaaaagaactttttgttacagataatatggaagcaaagacaaatttggaagaagattttgatgtgttatatcgtaatcacaaatttgaaccggatacatcaattgagctgggaaaagaattagaaagaatcggaaaagaaaagaagaaaaaattgtttgtggtgtcgccagagtgggcattagtagacaatacaatttatacattgagtgtacaattaagaagtgtcgcacctgatgtggtatccgtgtccgctgtaaatcgttacgaagtagatcgtcaatgccaattgtatggttatgatcaggagatatatgaaaaatttgtaaacgaaccatcagatgagtcctcaagaaaattgagtaaacaagtaaagaaatacaatattaattgtattattgtacagaataaagattgcgagaattatttggataaaattggatttaagcaagaagcggtaattcagggtggagtatattatgtttggtacaaatcagcaagataaatcaaacttgataaattaaaaaaggaatgctataatacccgaagtattgtatatgagtaaaaagtgagatataaggagatttcatgacacgttatatagaaaattttaaaaaattccaaccactgttatatgaattggttgcaagagatgtgaaaataaaatatcgaaaatccgttctgggagttttgtggacacttttgaatccattaatgatgatgattattttatcaatcgtattttcaaatttaatgaaatttgatgtgcaaaattattcgttatatttactttgtggacagatattatttaacttttataatgaagctacttctggtgcgatgacatctatattggggaatgcaccgttaataaaaaaggtatatattcctaaatatttatttgtggtgtcaagaatagcgtcaagttcgattaatattctgtcatcattttgtgcattgattcttgtaatgttatttacaagacaagaattacactttacaatgtttttagtggtaataccgttggtgtatctgatagttttttcaatgggtgtgggattgatattagccgcacttactgtaaagtttagagatatcatgcatttgtatacggtatttttaactggacttatgtatttaacaccggtaatttatcctatgagtatgttacctggatgggtatataagatagtctctataaatccattgactatgataatggtaatttttagaaacgtagtgatttataatacaattccatccgttggtgaatttatagttccgcttattatagtgatagtaacgtttttcttaggattatgggtgttctataaacagcaggataagtttattttgaatttgtaaaataataggagttttattatggatcaggatacgatcataaaagtagatcatgtttcgatgaagtttaatttatcgagcgaaaaagtagataattttaaggaatatttgattaaaagaataaaaaacaatttgaaatacgatgagttttgggcactgacagatgttgacttcgaagtaaaaagaggagagtcagttgcactgatcggattaaatggttgtggaaaaagtacaatgttaaaggtaattgccggtgtattgaagccgacgaaaggatctgtctcagttggcgggacaattgctcctatgattgaattaggtgcgggattcgatatggatttaactgcaagagaaaatgtatatttaaatggggcaattctgggatataacagagctcagatgaatgaatattatgatgatctggtggaattttcagaattggaagagtttatggatgttcctattaagaatttttcgtcgggaatgttagcaagacttgctttttcgattgcgacaataggaaaaccggatattttaattgtagatgaggttttgtctgttggagatttcagatttcaggaaaaatgtgaaaaacgaatccagggaatgatgaaagaagatacaacaattttatttgtatcacatagcattgatcaggtgaaaaagatttgcaaaagagcaatttggatcgaaaagggacatattcgtgatgatggtcctagtgacattgtgggaacagagtttgaacgagcttattatgcaggagaactatctgaataaatagaaggttgaatagaatgaaaacgattaaaaaaatagggatagcaattattataattataataggtgtggcttatgcgtatggaacgtggcctaggccgatatataatactgatataggaagtttatcttatgaaaaaacggattttctcactacagattctacaatggaacaaaaatttgtctgtgggaataacggattttccgggtttacaataaaaatgttaaagcaggacggacagaacatcggtaattacagatggactgtagaagaagttaaaactggaaaaacaattggaaaaggaactatttccgaggcggatacagaaacaagattatttgaaagcagtaatccgcagaaacagggaatggtaaatgtaaattttcctaagcagcaaaatagtaagggcaaggaatatagactgactttacaggcagaagaaatggaggatacagaatccgttgcggtttatattacggaaaaaaattcgacagaaagtgaattaaaggtaaatgaaaatgcaatgactgataaggcaagcgttgttaagctgaattataaacgctttaatgtggaaacatttattgttttcttgggaattgcagtatatttatggacatttatcaaatttatgtataaattgttccgataagtgagaggagtatatatcgtggatgttacaattgtaattccaacaaaaaatgcgggcagattatttgaaaaagtactgaaaaaggtatttgcacaggaaactacgtatgaatatgaggtgatttgtgttgattccggttccagtgataatacaattgaaataatcaagaagttcccgtgcaaattgtacgagattccggcttcggaatttggtcatgggaagaccagaaattatggggcttccaagggaacaggagaatatattgtttttattacacaggatgcaatgccggcatcgtcaaaatggcttcagaattttattgatgcaatgaaatcggatccggaaattgtcggtggcttcggaattcattatccatatccggattgcaatgtaattgataaaagggatttatattatcattttaagaatttcggcgatgataatacaatttttcaaataactgatgaaaataggcaacgctataaggaagaagaaggatatagacatttactgtcattcttttcggataataattcgtgtatacgaagagacatatttgaaaagtatccttataaagatgtttcttttgccgaagaccagatttgggctaaacaaatgattgagttgggatataaaaaattgtattgtccattcgctccggtttatcattcacacaattataagctgtctacatattttatgagatactatgatgaatataaaggactttattatctccagaattatcagatcgcaaaatcatggacaagacttccattgatgattgcgaagcatacgatatcagatgcgagatatatccggcatctggaaatgagtaaaaaagaaaagatacattggatgttgtattcaatgtcaagaaattttagtcgttattgtggcggctatttgggaggaaaatacgacagttattcatcaaagaaaaagaagtggctcgatcataaaatttctcaacaatataaacaaaggaaggcgtagtaatgactgtacaggaattttgtaaaaaaattataccttttttaaagaaaagaggtataaagggagtatataggaaacttttagaaaaagcacatgttattccgactaaaaatcattttttggaagattatgaatttttagttgatgatgtgaaaatcccttttgatgaaaaagagtatgaaattcataaagatgatgaacttaaaatattgaactgggttattcctgaaatgggaaagggttccggtggacatttgaatattttccggttcgtatcattcttggaaaaaatgggatttcatagtagaatatacttgtttaaagcacctactttacaggataatgaatcggtaagagagtttttaaaagagaattttcctattttagatgagcgggttgaagcttattgggatgtaaaatatgcaaaatttgcacatgctacaattgctacatcctgggagactgcttattttgtgaaaaattttgataatactgtgtcaaaattttattttgtgcaggattatgaaccatttttcttcccacatggttcatattatgagttggcgaagaatacttataaatttggttttagaggaatcacggcaggagactggataaaggataaacttattgctgattttggaatgaaagcagatagttttggattctcttacgataaagatatgtatgttccattgaagaaaaagggaactactaagcgtgtatttttttatgcaagaccggttacgccaagacgtgattttgaaattggattgtttgctttggatttattatgtaagaaaatgccggaagtagaagttgtatttgccggatgggacataagtacatttgaaattccgtttaaacatagagatatgggaattatgagtgtggataaattatctaaggtatattcacagtgtgatttgtgcctgattaagaacagacatttaatgtcgaaccttaaaacagtaaaggggataagaaagctagtagttttcttgaactggaacgaacttaatgaagttccatcggcggagccgaggaacaattaatttgctaagcatcaaagatgcaaagcaaattatatttaacgagagtttgatcctggctcaggatgaacgctggcggcgtgcttaacacatgcaagtcgagcgaagcgctttggactgaagaatgaaccgtctgttctgcttgttgatattggtggctggaccgttgaccttatgaggctggacaatgctgttcccaatgcagcaacgtgcaggagtctggagcttggagtaatccgatgcattgatgagacagcagaacaggtgcgtagaaataccggactgtctgtaacagaaactcaaattgagcgtgtgcttcgaggggagtcttgcagtatggcagaagaggccagacggattatacaggagaacggacggagatatatagaaagaatactgtctgcggtaacagaagctggatttgatctccgggcagtaccaaccgtatttatgggtggaggctccgcaattttaaaacgccacgtgaccgcacaggacgctctgtttaattattatggcatgcgaaacctcaggaataaaactacaaggtcccagcctgtgcatacggactcatggttggaaattcttaagtaaaaaagttgaccgtttgctcacaaaaaatccactgtctgagacgaatgtcgagtttggattttttgtgagctcgtttttaggtcaacttttttgctttagaatttccccatgttggagtcagcacaggctgggaccttgtagttttattcatgacattgggggatatggaacgattgacatatctgacagaattttttgaactggagaactacggaatcgccttatggaaagaatttggtgatgatgtaaaagagccatttgaagcgatgatgaaaatgttagatgagccggagtgcatagaagatcgatggcttgatgacgaagcaaaaggggaaaagtggttgttagaatttcaggaactggcattaacggaagaatacagggaatggattcgaaattatatcgataaaaaatatgaagaaagaggattaccatatccgacaggagcagacttcgattaagaggtctgcttttttctggtcttttgggaggtgataagaggtggaagtaagtatttatgaactcttggcggcagcaagagaatcggctaaatctgattatataaaaggggacagcattttgtgtgagaagagatttcatccagatacccattacatggtagaaatagatatttaattaattatcgcggcctctcagtccatgagaaaaacttggtgctctatttactactaagattccgtgatgtaagaaaatctaaggatgtccaaatctcctaaaagcaaaggcattccactcataactcgcttcgctcaaacaattcgttccatgcctttaacggagatttgaacaccctaagtttttctaaacatcactccatatacgcgacaaacagagcaccaagtctttctcatgtcgtgcttggccaatgataatgaattcaatagagggttgtaacctttgtgtgagtatttctaaagcatcaaaattgtcctaaaagcagcagtcaaaaaaacataactcgcaagctcagacaatgattttttgactgctaacggccaattttgatgcttaagaaatactaaccatgatctcatatgcacgcagcgggactctcttccttttcttccttacgttatcgcatactgtaatgattcaatagtggaagcgtaaccagcgtgataccgaaagtgtacaaaaaatccggaaacaatccgaagacgtgatgcggaccgaattaagagtagggaagtgtgtgagccatgcgtcaagaaaagccgctattgttttacttaagcccgtaccgtaaaccgacacaggtggatgaggagagaatcctaaggtcgacgggagaagcattgttaaggaactcggcaaaatgactccgtaacttcgggagaaggagtgccagcgagagctggccgcagagaattggcccaagcaactgtttagcaaaaacacaggtctatgcaaaaccgtaaggtgaattgatatttattttaacatcaatccaagaggatatatagctcttttagagtttacacagaattaattacagtctcaagaaaacagtataaagtggttctggttcaggttccatgctctaagaaaaactaagagagccagaatctcctaaaagcaaaggaactacgctcaaactcggcgttcgcctcaaacacgttcgcttcgttcctttaacggagattctgactctctaacttttcctaagagcattccacattcaccagaaccactttatactgttttcttcaagtcgtgactggcagcggatgttaataaatgaaatgcccggaagtgtaactcggtggaggccactacagtacacaagcttgccaaaaagtcatgaaaatccacttattggcagctgaccaccgtagccttccgctaccacaactgttaggcaattgccatttaattcgtaaggcatttgatacccacggaataaaaagtaggaagccgttccagtgaatgtgaagaaggtgttggaaatagttaagcgtcaaaattatgcgttgggttttcgaaatttgcctgtttgagccgaatggcgagttgcaaatttcggaagctcgtttttagcataattttgacgctttagtatttcccgccgacggaacctgaacaggaacggcttcctactttttatgcaggtccgggtaatcatgcctttctgaattaaatcccaattaccctaaatacacaaccttatcttccggctctgcggctggttccatatcgatcagatacagtaccggctgtttgtttccaaaggaacttactgcctcgtactcgaaccttgcacggatctgcatccaggattttgcttttacatcaatcttcttttctgctttgcatggatatccgtaataacgtacatcttccgcgcagcatgtcatgatctctctgaccggaacgaacatattgtccggcattcccttcgggcggaagatctgtcctttgaagtcgatttctttatgcagatataattccggatgatcatatgcatccacataccacacaccaaaatcaacatcatccagtacgatcttgtctccttttacatcatatgggagatcttcttcggatggctcgatgatcttgccttgcatatcttcaaagatcagctgtgccatcggattctgtaccttcagtgcacgtctgaatccggatctgttaacaccatctgcacatctgttaacaacgatcagctcagactctgtgagctgttccatcagcatatttctcatattcatcagatacatatccagtgttgtaccatttacggtagagtatactccctgaagttcaaaacttctcgggtatctgattgaaagcagatcctccagcttccacattccattgtactcgatgataatctgtgccggatgatagttcctttcacagtttttgaaaaatacagtgttcaactggtcaaattcttcgattttcagaactgccatatttttttcttttaaatattcttccggatactcttcttctccttcttcacagagaagtaacagtgtaagtcccggttcaatccattcctgttccatcagggtatccttgatcatggttgtcttaccactgtctaagaatcccgtaacgataaacataggtgttgccatactcgcacctctttcttttatggttatattgtgatttttggctccataataatatggagccaattattagtatcctatacgtggaataatttcagaaggtcgtcctctttcaggtctgttccgattacacagatacgtcctgtgtagtccggctgtccttctcttacttcgtactcttccggtactaagtcgaactgtttccatgatccgtctgtcatctggataatacctttggaacgaagaattgttccgtaagatgttgtctctgacagtgccttcagcagataatccagttcttcttcggtatatttatgaacagtctctttgccccagcttgtaaacacatcatctgcatgatgatggtggtgatgatcgtgatcgtgtccacagcagcaatcgtgatcatggtcatgatgatcgtggtcatgatgatcgtgatcgcagtgatcatgatcgtggtcatggtgatcatggtcacaatggtcgtgatcgtgatggtcatggtgatcgtggtcacaatggtcgtgatcatgatcgtgatcttcatgatcttcaaacaggctctcaatctcagcaccctttgtcagtgcatgactgattgcttctttgccaagctcatcccatggtgtagagataatcgttgcttctgcattttcttcacgaagtgtgtgtacgcattcttctactttttcatctgtcatcatctgtgtacggcttactacgattgttgacgcatgctctacctgatctttgaagaattctccaaagttcttcatgtacatttttgcctttttaccatctacaactgtgattcttccgtcaatttcaatgtccgcatctttttctacagcttcaattgctcttgctacgtcagataattttccaactcctgatggctcaatgattacacggtccggatgatactcatctaatacttttaccagagctttgctgaagtcaccaaccagtgtacagcagatgcatcctgagttcatctctgtaatctcgattcctgcatcttttaagaatccgccatcgataccgatctcgccaaattcattctcgatcagcacaagtttctctcctgcccatacatcactgagcagctttttgataaatgtagtttttcctgctccgagaaatcctgaaataatatctacttttgtcatgtttattgcctcttttctatctattttcaaaattaataaaagtcccgacacatatattatcacaaacagcgggtggttgccagtcccccaattctaatatttttctcaactttttataaatcacccgcaaactctgctgctcattatagatattttgattgcagacaatttcttcttgtacacatagtagagtaaaaaaacgatatctgtaccggatggtacagatatcgtctgctttttatgattattctaaaatgttcttataataatccgccgattgacaggaacagtggtgcaaataccagtgatacaactgtcatcagtttgatcaggatgttgatagatggtcctgatgtatctttgaacggatcacctacagtgtctccaactacagctgctttatgagcctcgcttccttttccaccgtggtttccatcttcaatgtatttcttagcgttatcccatgctccacctgcattagacatgaagattgccatcataacacctgttacaagtgctcctgcaagaagtccgccaagtgcagaaggtccaagaaggattccgactaccagcggtgcaagtactgccatgacaccaggaaccagcatttcttttaatgctgctgttgttgagattgcaacgcatgacttgtaatctggtttttctgtacccttcatgattccaggcattgtcttgaactgacgtcttacttcttcgatcatctggtatgctgctcttgatacagatgacattgtcatagctgagaacaagaacggaagcattccaccgatcagcattccgatgattacacgtgagtcaaggatatcaattgacttaagatgtactgcttctgcgtaagatacgaacagagcaagtgctgtcagggctgcagatccgatagcaaaacctttacccatagctgctgttgtgttaccaacggcatccagtttgtcagtgatctgacgaacgtgtggatcaagctcagacatctctgcaataccaccggcattgtcagcgatcggtccataagcatctacagctactgtgatggctgttgtagaaagcattcctacagcggcaagcgcgataccgtaaagtccgcatgtctggtaagcaataaagataccaacgcagatcaaaaggatcgggattgctgtagatttcatacctactgcgagaccactgatgatggttgttgcagatccagtctctgactgttctgcgatttcttttactgatttgtaatctccggacgtatatacttctgtgatgataccgatcagaagtcctacgatcagaccagctacgatagcgattgctgccttaaagtctccgaagaatactttactgagtacacaagatacgatcagtaccagtgcacttgctacataagaaccagtctttaatgctttgtgtggatttgaattctcatcaccttttacaaagaatgttccaaggatagatgcaaccagtccgagtcctgcgatcagaagcgggaagattgctccctcagctttataatacacgattccaagtgtcagtgcagaaacgagtgctcctacataagactcaaaaaggtctgctcccatacctgcaacgtcacctacgttatctcctacattgtcagcaataacggccgggttacgcgggtcatcttccggaataccagcttccactttacctacaaggtcagctcctacgtcagcagcttttgtatagataccaccaccaacacgggcaaacagagcgattgaagaagctcctaaactaaatcctgtaataatatcaacgtttttagtcagaatgtaaatcatgctgacaccaaacacaccaaaaccagctacacacatacccattacagctccaccggagaatgcaattgagagtgctttgttcattcctttttcttttgctgcatttgcagttcttacatttgccttagtagctactttcattccacagtaacctgcaagcgtagagaacagagctcctactacgaagcatacagcagtgatccagttcccgattcctactccgatgagtataaataatacagcaacgaagatgatcagaatcttatactctgctgtcagaaatgcctgcgcaccgtcactgatagcagcggcaatttctttcattctgtcgtttccggcgtcctgtcttcctactcttgctgccagataagctgcaaaaagaagtccaagaattccaaataccggaacaaggtacaataacatttccataaattctctccttccgtccgactttgtcaaattcatgtcagacaggtatatcttaacatattcttaacttttgatggcattattttttatttttgtacgttattccgattattttctgtgtattgtccaaatttccgacctttcattgattatttataatctatttttaccaataactttcttgtatagaagattaattataatctatcttcataagcacaagcccattcggtggtgccgtcgctccctctgaagtatgaacttttgcatccagaatttcctttaccttttccggagtatagaatcctctgccaacgcggatcaggactcccgcaataatacgaaccatattataaaggaaaccatttcctgtaatacgaagcacgatttcatcgtcttttttctcaattatcaaatcatacaccgtccggacggtatcctgcgtattcgttctgatattacagaagcttacaaaatcatgttctccaaccaaatattttgcaccggcacgcatagcctcaacatccattggaaacgatacgaacgtacaatatcttgtctttaacggatttggtaccgccgcattgtatatatgatattcataagtctttgaaatattctcctgatatctcggatgccagtctgccggaacttcatcggaccttactactacaatatcttccggaagcctctggttcaatgcatacgcaaatctctcaggcggaatggaagattctgtatcgaataccgctacatttcccagtgcgtgtacccctgaatcagtcctgcttgccccgataattctgatttcttccccggtaagtcttgctaatgatttattcagtttttcttcaatcgtaactccatttggctggacctgccagccgcagtaattagttccatcatatgctacgaatattctgattcttttcatgatgacctccacacaatctgatacaattattttttagtaacaagattacataaatttgggacggaggttttttaattcctccgtccctgtatacattttaaaacacccaaatatgcaccggcacgcatcttccgatcaccaccaccaaaatcacataagcaattacagtaatatatgccattctgtcttctttatgatattttaacggtttcatctttgtgcgtccttcgccgccacggtaacatctcgcttccatcgccattgccagatcattggctcttcggaatgccgatacgaacaacggaaccagaatcggtatcatactctttgctttctgaatcatattaccgctttccagatcagctcctcttgcgatctgtgctttcatgatcttatcggtctcttccagaaggattggaataaagcggagtgcaatcgacatgatcatcgcaatctcatgtaccggaacatggatcttgttcagtggtccaagtaactcttcgattccatctgtcagctcgttcggagtcgttgtaaatgtcataagcgacgagccgatgatcaggtagatcagacgaattgccatatataccgcagtccttaatcccccttctgtaatcgtgaagatccacgcgtgaaacagtactgccccgtctcttgtaagaaacagattgaacaacactgtaatcatcagaagcatgatgactggtttcaatccccttacaataaaggaaaacggaactcttgacattttaataataatgatcaggaacaatgttgtcatcacatatcccggaatgctgttgaataaaaacaatgaaatcagatataacagcgtccccaccagtttcactcttggatctaatctgtgtaatacactctttgccggataatattgtccgattgtaatatctcttatcatatcttcttctccagtgcctgcataatctcatctgccgcttcttctacagtcgttacatttaccttgactggtaaacctttttctttcagatcatgcatgatatacgtcacctgcggagctgcaagtccgattttttccagttcctgataatgtgcaaatacctctttcggcgcaccattatacattacagaccctttgttcatcacaatgatccggtctgcatatcttgcaatatcttccatactatgtgataccagaatgaccgtcatatcactctgcttatgcaggtatgcgatctgatccagaatgtcatctcttccctttggatcaagtcccgccgtcggctcgtcaagaaccagcactttcggacgcattgccagaactcctgcgatcgctactcttcgtttctgaccgcccgagagctcgaacggagaagatttataatatttttctttcaatcctaccagtttcagtgcttccaacgcacgcttttcacactcttctttgctcagcccctggtttttcggtccaaagcacacatctgtcagtacgtcaatctcgaacaactgatactccggatactggaacaccagtcctacctgattacggagtgcacgcatatcatatccattttggtaaatgttctctccattataatacagcgcaccgtccgttgctttcacaagtccgttcagatgctggatcagagtcgatttccccgatccggtatgaccgatgattcccacaaattcaccgtgtggaatctccaggcaaatgtctttgagtgcatgtttttcgtatgcagtcccgggactgtatacataattcaaatgttctatcttaattgcaatgtctgtcatttcttctcaccatttctcacatcaaatgttctattgttgtaaatgcgtaattgcttctaccagttcttcttttcttaagattccttttggaatatccagtccacgttttcgaagttcatctgccaggattgtcacctgtggtacatccaggcgatagctcttaagctcatccacccttgagaatatctctttcggagttccctccatcacaactttgccgtgatccattacaaagatcttatccgcatctactacttcttccatataatgcgtgatcagaattactgtaacattcttctgttttctgagtttgtggaccgtctttaagacttcttttcttccaaccggatcaagcatcgccgttggctcatccataacgatgcatttgggttccattgctacaacccctgcaattgcaaccctctgcttctgtccaccggaaagcttattcggagaatgatgtctgtactcgatcattccaactgctttcaggctttcttctacacgctgccagatctcatctgtcggaactcccagattttccggaccaaatcctacatcttcttctactacagtaccgatgatctgattatccggattctgaaacaccattcctgccgactgtcttacgtcccagagttcttctggattacttgtattctttccattcacccatacggaaccttctgtcggaactaaaattgcgtttaaatgcttcgcaagcgttgatttaccggaaccattgtgtccgagaactgctataaactgtccttcttttgcttcaatatccacttcatcaatagcacgcgatgttccaatcacattgccttcttcatcacgtttttcatattcatatactaatttttctgtctggatcatttccatcttttattttcctccgcgtcatatgtgttggaagttgctatgattctgctgtttcgtttcttttttttatgtttttcttatgctttttccggttccggatactctgttcccattgtatcaacggttacttttttcatcttctgctcatcaagcggtctgtcactgtagtctgtatctgtctcagcaatcttatttacaatatccattccttcgatgatcttaccaaatgcagcatatgcaccgtccagatgtggtgcagctttatgcatgataaagaactgtgaacctgctgaatccggatgcatagctcttgccatagaaagtacaccttctgtatgtgcaagattatttgcgaaaccgttctgagcaaactctcctttaattgtgtatcccgggcctcccattcctgttccgtccgggcatcctccctggatcataaatccattgatgacacggtgaaagatcagtccgtcataataacctttcttcaccagtgaaacaaaattattaactgtattcggagcaacttccgggtacagttctgctttcataatatctccattttccatctcaattgttacgattggatttgtcattttattttcctcttttctttttgttatctacaggacctgccactggcagctccttatgaacgcatagcattacaaaagcgccggcaaaaccgacgcttccattttagcggataaatccttatccgtaaagacttctatatcatttttatggattattcacttttttcaaaataaaatccatcaaacttgtatttgaatacacgataaataaatttctcataatccatcttataagttacaattgctttatgatctgcatcatactctgtaaaagtcccctttaatcccgaatctacaagtacattatctcctgtttcctgcgcactgctgacatatccggaataaggtactttaaacgaatctacaagttcaaatgtaccttcattttcatccaccagatatttgtaatacttggaattctttccgtcaaccgcagaacttactttcagacctatcgacgaccagtcataatccggtcttgtctcactgattccaatattattatcaaacatatacagataatactgcccgtccgcaaggctttcatctgtctcatatgtgatcgtatgctggccaccctgtattgtaaaatctcctttcttattcagcagaagacttacataagaagtatctttccagaaatctttttcaccgatcatataagaaaccaccggcccgtcatagatattatctactttgatgattgttgacgtctctcttgaacttaaaagtactgacccatttcctatatactgaatcgtgttgatatgcatccagtccagttcatcggaagaatttttcacacaggtctttttatattcgccaaacagatctcccagatccagtacctctgtcacctcaccggaatttacatccagtttcaacacgatgtctcccacgctgtcctgcgtcgtatcagttgcaagaatcaacatatttccattttcatcaaacacataatcatggtgcaatttgtaattgccaagatcatatacctttgttacctgcccaagacggttcacctgtgccatcttcttttcggaaatactgtaatacatcgaattctcgtcaaagataagcctgtgacttcggtatcccagaagaggaacttctcctcttaagactccgttattgtcataataatacataaaatccatagaagtactgtcatttccaagtaccacatacagcccgtcttctaacttgtccgcactttgttttacatccgtatcaagctgtactgcctcttctccatacagacttcccatctcatatacgatttccttcgtatccgtagaaccgtcttcattcgttatatagaatgtaatcgtattctccgtatccgggatcagaccgatcacctgaaattcatgctctttctgatactcttcatcctgatatacatttctgctaaagtcggcaatatcatcttcctttacatgaatcgtataagaaactttcaccgccgaatctgtctcaaaataaacatacaatgactgtgtattggttccaaaaggattgtattcgatcagcatattactcagtgtatactcctgagattcttttttcttttccagttcgtccgctattttctgctgttcttctgcattgtatgtttttttgatcttctcgtagatttttttctgtttttcattcattacatatgcttcattatctgactttttctgttctttcttttcatcagactctgaaacctgttctttcttcgttgtgctcttctctttcgtgtctgcatttgcacacgctgtcattcccatcgcaagtatcatagccaacattcctgcagtcatgattcgctttttcactttttctatcctaccttcttattattttttcacagttataaatattttaacaagaatttgtgttaaaaatatgaaatatggtcatttttattttaattattcatttttactctgcacctccgtatttttcaactcatatattacgattccacctttttcttcacagcccgttttccacaactccattagatccagtctgactttttccccgtaagtagccacatcgatccacataccctgttcattcttttcatatccgaccacaagaaaccagtgccagatgaaatctttgtacttttcaacattcaaatgtctcaacatcagatatggtaccggaagtcccttatcaatctgttcgcatatgatcttctctgcctcttctgcagtacctgtcccgtcgaatttttccatatcaatctgataatccgttccatatttttcattcacatctgaaatatattttgccagaccttcaatataccattccggcttttttacgccctgaactcttggacggatgtatggtttcataatctgactgaattttttgtatgcttctttatccatctgttcaagatcgaacggatataattttttcattcccttatattttgccagataaatacagctgtcacatgccgttgcagctccacatccaccaacattcataacaatattcgtgaaccagtcctgatttcctccgaattctccatcaatcataaaatattccagttcttttttcatatctgctcacctgtcctgtctatttgtctatataataatgcagccatctgcttccaacacctggtattactttttcagacatctgaaagaaattctaacatactttctcaagcgtacgcaatgggcggggattgcagattttctgcaatccccgcccattatttctctatattttgttattcttataagcttcttgacatctcttcgcatactttcatagcttcgatgatagaacttctgaagccgagctcttctaatgtacgaacagcttcaattgttgttcctgccggtgaacaaaccatatcttttaattctccaggatgttttcctgtatccagaaccatctttgcacttccaagaacagcctgtgctgcaaactgataagcctgttttcttggcattccgcctgaaactgctgcatctgccatagcttcgatcagcatgaatacatacgccggtgaacttccacttactgctgttactacatccatcagacgctcaggaacgatctctgcacggctgaaactttccagaaggctctttacatatgcaatctcatcttctgtaagatgttcattcgggcaaactgctgtcataccttctccaaccatagccggtgtgttaggcattgtacgaacgatctttacatcttttccaaactgttctgcaagccatgcaagtgtcttacctggtgcaattgtaatgataatctgtttgtctgtcacaacatctttgatatcagcaattacgctctcataaaactgaggttttacagacagaataattgtctctgctttctgtgcaacttctttattgtctgctgttacattgattccgtattctttctgaactctttctcttccaggtgcaaaaagatctgccccgataatttcttctgcaggaattacattattcttgataattccgcccataattgctgatgccatgttacctgtaccgataaatcctaatttcatccttattaccttcctttttaacctgttatgttctttttgctcccggcacgtgacacataaacaatctgttatgttcgctccgtgcttttgtatacgttttttaaatttgtatacaaattatttctactgtgactatatcactcatttctcaaaaagtcaacacacaaccttgaattttctttgaaaacacgttataatttgtatacaaatacagaaaatgtatacttttatataaaagctgatatgcactgctataacttactacgttattgtgaaagtactatttgaaaggggcatttactatggcagaaaaaagtccgtctcttgccacacaggcttatcataccatcaaagaaaatattctgaatcttacctatcctccgggcatggtccttaccgaggctatgctcaccaaagagctcgaaatgagccgaagcccggtacgcactgcgatccagatgcttcaggtcgaaggacttattgtctcggactattacaaatctatgactgtaaaagaaattacagataaagatatcaatgaaatttatcagttacgggaattattagagggggccgctttccgtcagatttttacctccgggcggtacgaagagtattcttaccgtattgaagagaaagtcgtgcgtatgtgcgccgctgcaggcgatctgtatgaatgggagattgcagatactgccatgcatatggagattatcagtatttttgacaatgacagaatcaaccggatctatgaaaataatctttccgaactgatccgcattggccagtattctatccgaaacgggatgagaatctccagaacaaatgacaatctgaaaaaaatgatttcttatatgagaaagggaaactatgagaaagcgtttgagatcttgaaaaacgaccatttcggaaccggccgtaacaccgcattaaaaatgcattaataaaatacgtatataaaaaacttgccagctgtacgatctgcaactggcaagttctttgtatatctcttattttttaaaatgttccaacatgattggcatacattgtttggaatattctcccaatgaatatgctcctttgttcaaacaccagtccgaaaccagcgcacgttcacacatcgagtaatatctgaccaattcattcaccggtacttcatccgatatctctcctcttttttgtccttcatcgatcacactgctgatcagtttataatatgtccggttctgatccagaagtgatctgtgcccctgtgctacaagctgtgttgaataaagcgaagccagaagatcaatgctgatcttttcttccatcatcgaatgtgcttcgtagtttagataaagaagcttctcataacagttcatatccggatccatcttggtctttaacacttcgtaattatcatccagaataatcgacaatgtattcaacaattcatctttggtattaaaataataatagaacgatcctttggatgttcctgacaattcaataatgtcatctaccgttgttccattatatcctttttcataaaacaactgccatgccgctgttacgattcttccttttacactttttttgttgtccgtttctatttccattcgttttctccttatccgccctcttttaaagtacttttagtataacatatttattttaacagtgtacacagaaaattcttcttaatactttacttcaaaactactttccagttccggctccatctcttcggtatcaatccagtcaatctggataaactggttccggttcaatcccttcatgagttcaaagatcagagtctcgcttccctgtacttccataactaccgtcccatcatattcattcttcacccatccggtcagattcatagatcttgccagatattttgctgtataacgaaatcccacgccttgtactcttccatggaatatcatatgttttcttacttccgacatctattaccacctctgaataattcagggtactgcgctacgcaataccctgcctttttacattccgctatgcaagaaaagcgaatattttcaacttcttttgcataactttcttcactcgaaattcttatgaacaagcctgctgtactcttcataagcttctactccctcaaatgcatcttttaacgcatctctgattcctatataataccagcctatgatctttttatccttcatcctgaaacggttccatagttcttctccatataccggataatccctgtcaatatcgcgcatattcgataacttgtccgccaatcctaccatctgtacttctctcggtgcatttcgtatatgttcgatcgttgcagacttgcgttccatccatgtcttggttttatcttcgctttcctgtgctacaattcctgccactcgttccgaaaatttccgtgcaaggatttctctcgatacaccttcacaatcttcaatcgtatcatgtaaaactgctgcactgataatctcctcgtcctgcgtcatcgttgagacaatatctcccacttcgatcggatgcacaatatatggcctcctggttcctttcctgaactgtcccgcatgtgctctcgtggcaaattcaattgccttattaatcataatggtacctctcttttatcgcatatggtctttggagccgatgatacggcctgattagttatgtctttaatatataaataatatcacctgatactttaaatgacaataatttcagtatataataaaagaaaagttgcctttggaccccgccgcctgctgtccctttcaagcgcatggcggtttggatatcctggcactataaattgatcagggggagataaattatggaacaaaaaacaatctttattacaggtgcttccagaggcatcggaaaaagcatcgcacttttattcgcttcccgcggatatcatacatttttgaattgctcttcttctgtagatgagctcaaaaagctccgggcatatatcaccgaaaaataccatactccatgtacacttgtaccgggtaatgtaggaaatcctgaccacgtacgggcaatttacaataaaatttatcaggaatgtacacatcttgatgtactcgtcaacaatgcaggtatttcctatattaatcttctgactgatatgacagatgaggactggaaccggatcattcaaactaatctttcttccgtattttactgttgcagacaggcgattcctccgatggtttccaaacgttccggaaaaatcatcaatatttcttccatgtgggggacatccggtgcttcctgtgaagttgcatactctgcttccaagtccggcatcaacggatttaccaaagcgctcgccaaagaactcgcaccgagtaacgttcaggttaatgcgattgcctgcggagtaatcgatacctctatgaatgatcagcttaccagcgaagagagaaaggctcttgaagaagaaattccggccggcagatatggtactccgaaagaaatcgctcagatggtatggaatattgtacatgctccagaatatatgaccggacagatcatcggagttgacggcggatttctataaaatttttttgaccaaccgatattcatacaatactgtttcttaaacataagcgaaccgtgcaataaatattgcacggttcgcttatgtttttctttttatatgtttttattcaaaatcaagttccacggggcaatggtccgaccccatgatctcagtcaggattttcgcatcttttatcctgtctttcaggctttcagatacacagaaatagtcaatacgccagcctgcattcttctttcttgcactgaagcggtatgaccaccaagaatagattccctctgcatccggataaaaatagcggaacgtatcaatgaaccccgcatttaacagattcgtaaattttcctctctcctcatccgtaaatcccgcatttttacgattggttttcggattcttcaaatcaatctctttatgtgctacattaagatctccgcagaagatcaccggtttcttttcttctaatttcttaagatatgcaagaaacgcatcttcccatcgcattctgtaatccagtcgtgcaagttcgctctgtgaatttggtgtatagactgtaataaaataaaagtcttcaaactctaacgtaatcacacggccttctttatcatgtgcttctattcccaatccatagctcacggaaagaggctcttcttttgtaaagattgccgttccggaataaccttttctctcagcataattccagtactgatgatatcccggcgtatctagttccagctgcccagcttgcatctttgattcctgtatacagaaaatatctgcatccgcttcattaaaaatatccataaatcctttttgtgcacatgcacggattccgttgacattccacgatataaacttcatatcttcctcccgaccgttcttacttttttgtcccggattcacccatataggcgcagtttaataatatacttttcttaaaaacaatcctcttgccggagctaaaaatcctgcaaggcttctgtcctctgctgcaattacgactggcagcatggatgcatccctctttcctgcaccaatctccagaagtgttcctgtaaggattcttaccatatgatataaaaatccggttccgtaataggtgatccgcactttttctccgctgcttactatcttaatgtttgtaatcttacggattggatctttgcattctttatcatccgtaaaacttgtaaaattctttggtcctatcagatattttgttgcatcacgcattgcctcgatgtccagtttttccggataatgatagcaatatcttctggaaaaaacatccggtttttcacgacagtcaatataatattcgtattttttccctttggcactcttgcgtgcatgaaaaccattcttggcaagttctactttcacaatacggatatcttccggaagatatctgttcagtgaatctttgagttccttggtatcatataatttagaaagtttcacacttgcaacctgtccacgtgcatgaacacccgcatctgttcttcccgatccatctatatgcacacgatatccaaccagtttaccgatactccactccagaatatactgtattgtgttatctgttgtggcctgtctctgccatccctgatatctgcttccatcataggaaatggttaacttatatgttctcatattatttcacccaatctattctatcgttcatcttctatcattttatctgtttctattatttccatatactgtaaagataattctatatctgttttctttttgaaaaagggagaagcaaataattttttgcttctcccttatattctatcactttattactttataagcaattcattcttattctaatatcttctttaattcatccataaacgtacttacatctttaaattctctgtaaacagatgcaaatctgacataagcaacttcatccagtgccttcagttcatccatgactgcttctccgatcgcactgcttggaatctctttttcctccaggctgaaaacttttgtctctattctgtcaacaactttctgaatatctgctgttgcaaccggtcgtttatagcaagcacgcacaactccattctctactttccgacgatcatactgctctcttgtattgtcctttttgatcacagtcagtggaattgtctctactttctcatatgtcgtaaaacgtttgccgcatacatcacatgaacggcggcgtctgatagaactcccgtcttctgccggtctggaatcgataactcttgtatccggattattgcaatatgggcacttcatctgaatcgttcctttctgtccattatactgtctttatattcaaatacagtatatcttttccacaaacataagtcaaacaaatttctcctatttttcttcatggatttccaccagaatcaggtccggaccaatccttttaatgcaggaaaaaggaatgatatactccgtcccatctccgaaaaaattacaccattttcctccctccggtaccaccagggcctctatgcatcctttacattcatcaatgatcaaatcctctatataaccaagctttttacagtcacagcagttgatcacttcttttttcttccattcacttaatcgaacttttgccatcttccctcacctgttttgacaatattctgctctttattccattttatactcattttctgtaataaagagtcctgttttaaaatatgcaaagcccccttctccggtcaaaaaaacagcctgtacatccacagtgctacactgcgtctatacagaccgttttcctttttattcttcgatcataataacagccaccggacactcttctttggcctctattgctgcactttcatgttccggtgtcactttggcataagcttctgccaggccgtcttcatcaaatcggaacacctccggacatgttgcgatacatgctccgcaggagatacatccgtctataacctttgcttccatgaaacatccctccttgtaaaatctctacaacagtatgtctcattttcagcaaattattcctgttcttatctaatcactgtaccggtttttcccttaagtgcttcatcgaatttgtcaaatgatgtgatcagcgcacttcttccttctctcttttcgagaaattcaactgctgctctgaattttggatacatgttatattttccaaaatgtccttcttccatgtattcttttgcctgagcgacgctgatctctccaagctcttcctcttccggtctgtccatgttgatcttaactttctcaacacttgtcagaatgatcagttcatcggcatctgtctcttctgccatctttcctgcagtcagatctttttcgattacggcacttgctcctttcaggcgatgatcctgttccagtaccggaataccgcctcctccgcaggctataacaacctgatctgcatccagtaatgctttgatcgcatcaatctctacgatgttgaccggattcggtgcagatacaatacggcggaatccttttccaggctcttctactacataattaccttttttgcgctcggcacttgcctcttctgcatccatataacgtcccagaacttttgttggtgtatagaacgcttcatcgtacggatcaacgatcacctgtgtcagaactgtactgacagttctgtaaataccacgattcatcaattcttcacggattgcattctgaaggtcgtatccgatatagccctgactcatagcagaacatacagacattggtgctgccgtatactcttcatgttctttggcaaattcattcattgctgtatggatcataccaacctgaggtgcattactgtgtgtaattgcaacctgatatcctttttcaatcaaatcaccgataactttcgcagtcttctttactgcctctttctgttctggtaatgtcgtaccaagtgctctgtgtcctaatgcaactacaactctttttttcataatctatacctctgcttttctagtatttttctacgaaataaatataagagaattatagtatttttccatgtaaaatgcaatcttttttacccttatattccctataattcagtcatttatcctgtatacattttataatctgtcaaaatccatatccagaagctcatcaaaagattgaatagaagcgtctgctttttctactttgccgaatccgtaagctgcatagatcatcggtatttctgcttccttacacgaattcgcatctccctgtgtatctccaacataaaccgcctcactcagaccatttctttccatgataatccggatattctctccttttaatcttccggtataagccgggcaagtgaaatccttaaaatactctcctaattttgaatactgcaaaaatgcttcaatatatccgtcctgacagttacttacaatatacagtggatatttctcacttaattttttaattgtctcctgtacaccttcaaatatcacacatggaccggccgcaaccaatccattttcatatttcaacattttctccatgagcttcatcatctcatctttcggcatctccggaaaaagactttcaccaatcgcttccattggctttccaaactcttttttcagatctttttcttcaagctctttgtgttctattccttcatccttgatcactttattccatgcaactgctaccatttcggttgaatcccataaagtaccatctacatcaaatataattcccttcatttccttcctccgttatctttttgttcataaaactgtctttcctaagtatactatacttcaaggctttactacaagcccggtcttctttcagtctttcagcagtatcttttcccgtgattctataccttcccatggatttatccatatttctacattctttttcagttctttattataatatttgatctttattataatcttaccgtctgtataatcatcatacagctttcctgtgtttttatattcatatgaataccccatctgtccgtgatttttcagatccttccattccctggatgataattcttttttgaatactttcttcttgccgattttcatctctagcttcacatcttccacattcttcatatacttttgctccgaagcacgaacattcagataacctgactgatattcaccatttcctgtctcatctgcctccagatctgccatcggaagccagtcgatctgctccagtaaatactccgtcgaatctgtatcaatgacgacattctgtttttcaccactcttatcaatattaagactgatattcaccggattctccagataacttaccggtatctctgcctcgccttcatatccattttctttttttaccatatctacagatatgtttccgtcactttcgtcggtcttaacaagacctgtcatttgtgtttctgcgctgtcctgaaccagaacacactttaatttcagatatatctttccgtcctcggaacaacgtacacttctgtaaaactccgatatgattccttttggccttcctatctgttcactgtcttcatccgtttcctgctgtacgatctgtgtcgtctgtgcttctgtattatttgatttttcttcaataataaaatatcttacatatatacttccaccgatacacgcagcaagaagaaccgcagaaattgctatcaaaactatagcatatctcttccaccgttttatttctttttgacaatgttctattctttctttttcatctttacgttttgtatcttcttcgcattccatccccaaaagctctgttatagacacttcaaaaatctccgccaataattttaatttttctatatccggaatggcactgtctgtttcccatttggatacagactgtcgtgacactcctattttttccgcaagctgttcctgcgtcatagatcgttttgtcctcaacttatatatcttttcacctaatgtcattttctcaccttcttaataatatctatacgaaatgaattcatttttttcattatgtcttattctcctgcatttgtccacatatgtaacattgcaatctcgcaaccattggttgacagctttcatttttcgtaattttcagacttttcatccacttttttatttcttcatattcacccgcctcttgctgtgctatactgaagacagtttatacaatgtctgaatctgcagaacgcatagcgatataaaatatgattcagcaacatatgaccggtttatgaaaggagactactattatgaaagttattgtaatcggaccaagaggtaaaatggggaaactgatcacacaggtcgctgccagtcgtgacgatatggaactggtgggtgcaatagcaccaaagggacgggattatatcggaaaggatctgggcactgttgccatgacgggcttcgaactcggagttcctgtaaccgatgaccttgaaaatatcattgattcctgtgatgtcatcattgatttttccacaaaagaaatggccatggaagttctggatcttgctattgcccataagaaagcactggtatgtggatcgaccggattttccgctgaagaaatgaaacgcttcgaagaagccggcaaacagatcccaatgctctatgcggctaacacttcaaaacttgtgaatatcatgaacaaacttctggaacttgttactgcaactttaaaagacgagattgatatcgagattctggaaatgcatgatcagtggaagaaggatgcaccaagcggaacttctaaagagatgggtgagatcatggctcatgctctcggcaaagagcttagcgatattgcagtctacggacgtgaaggcgaatcacctcgtgaacctggaaccatcggctaccattcccttcgtgccggcaatattccaagcagccataccgtatacttcggaggcatgggcgaacgtctggaaattacccatcactcctataactgggaatgctttgcaagaggagcctgtgactgtgctgcttatcttgaagggaaaggccctgggttctattccatcaaagatgtgcttggaatttaatccactaatgaatggatcaaacacagaactacaaaaaatccgccattggcagttccttacgaacgcatggcgataaaaataaaaggtacattcccttgccttaaaatctgcacaggaatgtaccttttattttattccggccggatatcaaccttttcacacattaaacaatcagaccttccagctcgtccttggacatcacacccatatctctcttaacgacttctccgtctttgaacaccagaaatgtcgggatagacattacacgatactgtcttgcaagttccggttcctgatctacgtcaattttgcatactttgatatctgtacgttcttctgcaatctcttccacgatcggtgccatcgtcttgcatggtccgcaccatgttgcccagaaatctaccattacaggtacttttgactccagtacttcttcattaaaattatcttttgacaaatgtataactgccatatctatttcctctctttcgtaatgactattatcatgtaactacatgcttattataaccgattccccaaagttatccatataaattctataaaatattctgaaaaaattattcaataataattttgtatgaagcctcaaattctccacccgcttccagagcattttcccagtctctgtcttttaattccccgtcgaatctttcactgtcacaacgtccataccatggttcaatgcatacaaacggagcctgttttttcggtggtgaccagattcctgcaagtggtgcgtcaaattctactgccagatattccttcctctgtggattcgtcaatgcgaccctttgaatctgatgcccttcaattaccagcgcatccccgtcaaacaaatgctcatcaatagaaaggaagccgtctgtcagcttatattcttttttctgtgttgtaacaactccgtcttctccgaataccgtattcgtcagtgattccggtgcatttccttctccatccttaaacttcaggaaatattctgactgcttctcgccttctctgaccgggcagaagaatgccggatgcgcaccgatcgcaaaatacatatttttctcatttgtattttttactttccacattaccctgacagctgttccttccagtctgtatccaatctccaaatggaaatgaaacggatagactttacgggtttcatcggtatcctccaacgccagccatgcctcatctgtgctccggcttatcaatgtaaagtccatatctcttgcaaatccatgctgattcatcggatattctttgccctcatgtctgtaaactttattctttactccgccgacaaatggaaataacacaggtgacgtccttccccagtattttgcatctgcattccacaaatattcctgtccgtcagccttacttttcaacgaccgcaattctgctccgtgaatattcacagttacttctatctgttcattttccaatctgatctgttccatcaatctctcatcctttctgtctgctccattccttctaaaccttttccagatccagttctgttccatttagcactgctgacaccagaccgtcatgtccgtcataaacgagtttcagcgagaaaaacggaaccttttctgctatcagttttaaaaatatcttatctcctctccagagattcagatcctgtatcttattaatatcaacccattccaaaacgccttcatcacaggcaatctgttccccttcaaaaccatctgcgtgaaacaaagacatatattctgtcactccgtctcccgatacaaatgttacaagtccacagaacctgtaagaagtaagcgtatacccggtctcttcttttacctctcttagaacacattcttcagggctttcatctgcctcaaagtgccctccgacaccgatccattttccctcattcacatcatttttcttcttaattctgtgaagcatcagatatttattatctttttcaatataacaaagtgtactgagtcctgtcatttcatcctctctttctgttatttttacatttaatttatctgattttactgctttagtatccacggcattcatgatatgatatggataccagcgttataaatatcagcgttatacatgccagattttgtttctggcattattatacctatactacaggagaattgcaatgaaccgtacaatagaatacctgattaccgaaaaagaagacggactccggattgaacaattcttacgaaggaaaggatattccggtcagaatcttgccgaaatcaaacgtatgccaaaaagtatactggtaaatggtgtccattattatatgcgccagacactgactgccggagacattctaaaagtcattatctgtgaaacaaaatgctctgagaaaatccccccggtggagattccactggatattatctacgaagatgaagacatcatcgtgatcaataaacccgccggcatgccgattcatccgtcaatgaacaattattataattcccttgccaatgcacttgcatggtactaccagaagcaggacaaaccttttatctttcgctgttgcaaccgtcttgaccgcgatacctccggactcactgtggtctccaaacaccttgtcagcggaagcatcctttctaccatgactaaaaaccgggaagtacaccgcgaatatcttgcagtagtaaagggccgtgtcacaccttcatccggaacaatctgcgccccacttgcccgaaaagagggaacaatcattgaacgcatggtagattttgaacacggtgaggaagccatcacccattataaactgataagagaagcaaacggacacagtctggtctcattaaaacttgagacaggccgtacccatcagatccgtattcatatgaaataccttggctttccactgatcggtgattacctgtataatccagatatggaacatatgaccaggcaggctttacattcccatcatatggaatttgcacatccgatcaccggtgaatggatgtcatttacggcacctcttcctgctgatatggcaaatgtattaaaagactaaaaaagcagtattgtattccgatttttcatcgttatacaatactgcttttcatctatatccagttattttttagactcctcatatgccttcagttcatcgagtgcctgacctcccatcaggtacaacgctgcaatgttgaagatcgtcatcagaccgattccgacatctcccagatcccatacaaatgtataagtcgcaattcctccaatgaacaacatcacaagtgccaatactttgtatgccgtctgccagcaccatttgtcaccaaacagatatgccacattacatcttgcataaaagagaattcccagaaatgtagaaaaactgaacaggaataaggtcactgcaatgaatatcactccgaattctcccagatgatatctcatcgcagtctgtaacagatccattccttcttttccagcgaccagtttttccggtaccagtaacatgatcatagcggtacagctacagattacgattgtatctacaaacactccaagtgcctgtgttaatcccgctttcaccggtttgtcacattctgctgccgctgccgcacatggcgcagagcctgaaccagcttcattcgaaaataatccacgttttactccgttcatcagcactgctccaaatccaccggctgccacctggcggattccgaaagcttcctggaagattcttgcaaatacccccggaagacttccgatattggtaataataataaaaatcgtaatgcagaaataacacaccgccataaacggaaccatcagatccagtacttttaccgtcgcattcttacgaagtacgataatcgccgcaaggatcaccagaacgatcgtcgtataaagtggcggaatagaaaatgcatttttaaaagatgcagccacagaattactgattacctgactgatcccgcaccagcagatcaaacctgagatggcaaataatactgcaggcagtacgcactttctcttctttccggtcctgccttccacataatcatggatataatatgccggtccgccgcggaaacctccgtataaaggatctttttctttatgaatctgagcaagtgttgcttctataaatgctgtcgaagaaccgatcagcgctgtcacccacatccagaatatagctcccgcaccacctgcggatactgccgcaacaacgccgaccagattccccattccgacacgggttgctgtcgatacgatcaatgtctgaaaagtagacagactgttcttgtcttctttctttcctgtcagtaccgttaccatatccggaaataacctgatcggaagtactctggtccggatggtaaaatatattcctgccggtatcagaagtatgatcaacagtgaaattccgacactaccgcctcccggaagaggtatctgcaataaatctccccacaaaaagctatatacttgttctattaatttaactatcatagtataaatatcctttcaaaatctcaggactttaaagcactacactttaaagccctgaattacatcatactatattctgatctatattgcaaactgaaacttacttttgttcatttatccctgtaatcataaatattaatcaatcaggtcgttctggaatctggacaaatgctcatacggaagaatcaaccttccacggtaaagtccacatccgtcattgatcagactgttatttactgccgaaaacatattcacatccagttcagccagcttaagattcagaagtttcattcctctctcataagcctcatcaaaatacagacactctccttccgggattgcatctcttctggcccgttcatgttcctgctctttttcataaccgatatgatttgccgagcctatttctgcaatgtcatccatcattttggttcgaagctgtacctccatataacatcttgaactattatcgtaaaatgtaatatgtaaagactgataattattcgaactatggctgcagatataatctctgtaatacggtttcactgattcgttcaaaagcggggatgtactttcctttatccccatggccggttctgcactaaatccctgctcctccaaaaatcccggcagtacatttgcgatctgatacaggtatttccgctcctgctcttctctgtcttcttcactgttcagatggcatctgggaactgaaataataattctgtaagcgattaaatctctaaagcaactcaatcgtttcttaacttctgctatgctcggatatttcccgtgttcttcataataatcataaatgaattccaccacataaccattgaatttctcttctgcccggatcagtgatttgatccttcctttgaaagtaaatgccataaacggatattctttcgccatatatttgtaaaactctctcattttctgagactgcgcagttaagaaatcattatgctccagaagttcctggatctgcaacagaaaattacaatgaatcatatctatttcatttcctgttttcttggcatcttttctcagatctttgatgtaattgtgaagaatccgaagtactgtatctccggaatacagatagtcatttaatataaccatctctgtcacactcctcttctgtcttttttcttctctcctgatttttttattttaccaaatttttcttaaacatgccagactggtaaaaacgaagtttttcccttttacgcttccatccttttcagctccggcatcactgtacatagcatcgtgataaagcagatacttccaccgatcacatttgataccggctcggcaaggaataccccatccgttcccatatgtaatacatatggcatcagataagtaagcggaactacaatgaacactttacgaagcagtgaaaagaagattgcctgcttcttcttattcagtgatttaaatactgtttgtcccatatactgcagatccataaatataaacgccgcaaaatattgtttcaacgccggaacggcatctttcataagagtcttatccgaactgaatatccggatcaggacttccggaatcatgataatacttccccacatcactcctgtatatataaggatcataactgccagaactgcaattgattttcgcacacgcgcaggacgacgagccccgtaattatagcttaagatcggagacgttccttcatttatcgcatggatcggagtctccacaagctgacgcacactggaaatgatcgtcattacagagatataaatatctccgcctgtaacagacagtacgttgttacaacagattgtcaccaggctgttcgtaagctgcataataaatccggccatccccagacttacaatatttttcgcataccctgtacattccgatatctcattcttccgtaaaaaccgtactttcaattctgcttttcctgtaaggaaaaaaagaacaaaggctgccgataatgtctgtgacagtatggtcgcaatggctgcgccccgcactccgaatccgagaacaaagataaacagtggatcaagtatcagattcgcaactgctccgattgcaacagaaagcattccaactacagaatatccctgggcattgatgaacggattcatcccgactgcgatcattgacggcaatgtaccgagcagatagatcatcatatacggatacgcatacaccagtgcactcttagaagctccaaacaaaattaaaatcggtcttgcaaatagtaaccccgtcaccatcaatatcacaccactgacacaaaccatggaaaaagaagtattcataatacacacggcttctctctcctgccttttccctctggaaatagaaaaaagcggtgcacctccgcctccaaagagatttgcaaatgcagtaatgatcacgatcaacggaaagcagattccaactgcccccagtgctttcgttcccacctccgggatacgtgcaatatatacacgatccacaatgttatataataagtttaagatctgagcaacgagcatcggaagtgctgcaccaagaatattcccggtcacggttccattttcaaagtcaactcttttcatatttttactcattccttttcttttttcttgcgttttcagtataacatcggttattatatatgtaaattattgtttttatatggcaattcaacattttttatatggctttgttcataaataactcttatattttttatttttatcatatagagaaaggaaattttatggaactgaaacagttagaatattttcgtactatcgtagatgccgggaccatcagtggtgcggccagagatcttcatatgacacagcctcctctcagctatcagatcaaaatgctggaagaggaattacaggtgccgctttttcttcgtggtaaaaaaagaatcactttaaccgaagccgggaaaacactttacgaacaggcgggaaatctcctgatgctttccgacctcgccaaacgtgaagtgataaaatccagccagtctgccactctgcatatcggtatgaccccttccaccgtatcaatgatgtccgatcatcttcttcattttgcaaagaagtatcccaaagtgcgttttgatgtacacgaaggctcaacctttacactaaaagaccagctggaaaaccggatcatcgacctcactactctgcggactcccattgcattgaacggatgtgaaacaaagccgctcttaaaagaaagccttatggctatgagcattcctgattccccgcttcttcaggaacgttcttctatcccgcttaaagagctttccagacagccgctgattctttcataccgctatcgtaaatatatgctggcagcctttgaacgcgccggactgatgtgtgatatatatttcacttgcggagatgcccgcactgctatgaccatggcagaaaaaggacttggtattgctatccttcctgcttcaatgcagacgctttcttcaaaacttacatcatgcaggatctcaggcgcagatcttactacagagatcctgctagcatggagaaaagaacaactcccggaggagattcaggactttctaaaaatgtgggattagcagatcaggatcttgtccacacacaatccctgtcaatctcttccagactcgtcactccacacattttcatcgtatcttccagttctgttcccagcttttcgatataagatttcacgccttcttctgcgcctccgtatacagctgtcacaaatggtcttgcaatgatcactgcatctgctcccaatgcaagtgctttaaatacatccacaccactgcggattccaccgtctacaaatatcttcatagaatcacctactgccagtgcaatctcttccagaacttctgctgtcgccgggcactgatccagtacacggccgccatgattcgatactacaattgcagatgctcccgcctcttttgctttcaatgctcctttgacggtcataacacctttcacaataaatggtgtgcctgccatcttcgcaatctgacggagttcttctaccgtcttacttcctgccggtggctccatattcttaagaaacggaagccctgctgcatcaatatccatcgccactgcgagggctttcgattcatgtaccatctccatcttcccggcaatcacatccagattccatggtttcacagtcgggattccgattccatctgttttcttaatcgcttttgttgctgcaaccatcacattactgtccacgccatctcctgtaaatgcagcaattccgtattttgcacaggaagataccagaatatcattatatgccacatcatccaggcagtctccataatgtaatcctactgcaccaaccggacctgcaaaaaacggatatttgaatttcttcccgaagagctcctgtgatgtatccaccggtttattctcggcaattgtatccatctgtacacggatttccttccatttgtcataattgcggatagctgtatcccctactccctttgcgcccggtcccggcatctggttcttacaggcacgtccgttacactccggacaggctttacaataatttccaatacgtgttcttgcattttctatacattctgaataattcatatttttttctcttttctttcgtttcctaacatcttccacagtttctgcaaggattacatcttaattttttcagttttagattccagtcttgaatttccggtaacttttccccggttatccaccttttcatcccataatgatctgaaaccgtaactttatccccattccactcaatctccagtggatacagtgtaatattttcaggattcatacagttctgatgaagtcttggtgaatacacttcttctccccaggatacggcctgatctattgtccgaatccgtatatgcgtctcactgatacgtaaaatctccggttccgctgcacaatgatatctttcaggtatttcattcttgaaaacagaaatgattcctaacggcgtcctgatcttttcattctttttcatcttaatatccgatttcctccagaatccgctcaacaagtctcacatttttcagcgaaaattcttccgtaaccgccggcttctcattttcatcgatacatctgccaaattgttctacctccaagcgataattctgtggaacttctaccgtctttacttcttcctgcccctcagccgtacgaatcgtatagcttaattctccatcaccattgaatgaaaatttggttccggtaatgcttcccttcgttccatctatctccagacggtccagtctcctgtcctgatccgttgcaaatgtcatgccacaggtaaatgctgctttctttccatctgcgaattccatgaccacagaagtcagcttatcgatcttttcttccgaaaagattgcggaagcctcgactttcgctggttcttcattcagaagtcctaacgtcaggcttgtgctgtatactccaagatcgtatgtacaccctccgagagtctcccgtctcatccggatattttccttattataatctgatgtgataaatgcggaatctatataacgaacttctcctatcgttccatcttctatctctttcttaattgcagtgatatatggactgtgctgatacgcaaaagcttccataagatatacatgattctcttttgccttgtcaaataattcttttacctgcttttcacacggtgcaagcggcttttcacacagtacatgtttgccgcttttcatagctttcacggcccactcataatgtaaagtatttggcagcgcaatatataccgcttccacttccggatcatccaacaattctttataacttccataggctttttcaaatccgaatttttctttaaattgttcagctttgtctatgcttcttccggcaattgcatataattcgcagttgtatgcctgtatcattcccggaatggtacaacttctggcaattccggcagttcctataacgccccacttgatttttttcattgttttacgcctcgctttatgtatgataattttattttagcacttttggaaacattatcctactaaaaaaatgtaccttttatccttattactcgggtactgaaatttactttttcaaatcagccatttttcatatttgaggaatactttgtgctgtacataacgccccataccccacttcctcattcggatactcgtcaaatcccggtacttttttcgctccacgtctcagatacgccttcactttttccccatatagatatggatcgtttcctctcacaatcccccattccatcaaaagcgctgcacttcctgtcacaaatggcgtggcaaaggatgttcctgtaaatgccgcatatcctccgcccactgttgttgtcataacttccactcccggtgccacaagatccggtttcaccatatttgtaagtctggtaaatcctcttcccgaaaaatccgcatatgcaaatgtccttgcgtcatatgctcctacggatattgcacggctggcagaagatggaattgtgagcgtcgtagcatctgttggaaacaagaatcctgttccacggttcaatacattgtcgcttggaagccacatttcatattgtcctgtcacaatcttcccggcacttagaacaattctccatattccttctgtcagataactttctaccggaagcagatctatatagatttcctgggaaatgctgtaaggacttggttccccataataaagcagtatttctgtctgaccaattcggaagcgatgtggtcccaatatctccggtaccggtccgacccgcactcccgatggattgatgatcgaaatctctatttgatccgtatattctttccatatctggatactgatcgatgactgtctgctctgaattgcaagctgaattgtctcttctccttctgaaataattctaccggaagtatgcccggcacttgccgcttcatttccggttccgatgcaaaatacactcttccatatattggacacatcatcgatataccgttccagaagtgtcgtcccgtcatgtgaccattataactaagggattttttcatctactaccataaacataaattataagactgatataccgcaaatctttgcagaatatcagtcttcccatgtaaatatattcctaccaatcaataatctcaaacatttcccttatatttgatccccttttattttcattatcccaaatcacgtccgtctttgttattcgaatatcaaaatttgacttattaatattataactgtttttaacaatatattcttttaacctgtccaacataatgttatatgaatttccttttgtattaagatattcataaacgtcttttttagccttaaaattatcaatatttttaaatcccaacgtctgctctataaatttttttacatcctgtccttgatattcaaggatatgcaaacacgcaatatactcgaaatcagggttatctaatataagaaaatgaggaatccttttattactattttgcaacttacagtattctattatttcttttagctttgccaactctcctgggtgtttttttacacgatcataatcaataacaataaatttcgccaaacaattattattagcttctttttttatcacttctaaaaagttcgaatacccgccaccatgcatattaattggtttaagtgctagttctacgccttgatttaatcgcattgtatcaatataattgtactctgtatcgccctcacagaatacaataaatttttttcttagctttcttttttccctactcaaacgcagtgcctcctaaaatccccttcatataaaattcatatatctttgttgtttcatatcttatctctggaaaatctgccaaagaatacaattcagaattaagggtatcccgattttttgtcacgaaataaatttgttctttcatataattctttaaatccaaatgtaagatattatgacttgaaaaaatgaactgtccccggtgcttgtttccattaataaatgcaacaattctctcagccaaaataggattgataacccgatccatttcatctgcaaaaactgttttatcctcatatacaaccctaaaaagttgaactgcccatgcaaaaaattctccaactcctccagaatccatgccaagttctcttgaaaaatattttccatttttcatttttctaacaactttggtttttctaaaaggtttttcatcgtcaatttcaatattgcaaatactgtagtctaccattctcaatatatctaagaagcgattatcttttatgattctcaaatcgtcatcttgcgtttggaggttcttgtaaagatagtagttaaaatttttactttctactatcaattcttcgttcatccaattaacaaactcgattgcatacatgtctcccaaaatagccagtttagatacaaaaaggcctaattctcctttgttaaaaaaagactgatccaaaatttttttaacgttttcatcgcaattatccatatttaaatcatatgaagccgcaatagattttttttcttccattctatttaactgttctctttttacatgaataaccactttttcctgattactttttttgcttctataagtaagtttctcttctacaatacaaaattcatcaatttgtagattataatgatatattagttcactttttccgataatacaaatatcaaattcttgctttgtattgctttgagcaggacactctgattttaagttattaacgttaattaacggacgatatgaatgctttgctttagtatcttcaaacatactttttaaatatgaaagactattaataaaattagtttttcctcctgcattttcaccaattacaactgctactttcaatacatcataccctgcatctgttactacataattatctggaaaacgatttttcaccttattactcggtgcaagtaactcaaactctgcattttcatcgaaagaacaaaaattattaaacttatacgataatagcatttagcacctccaaattttatttttgtttttattatactatttttccagttaaaatcaattatattcttgtaacaaaacatttttttgttttaatctccgtttttattcatacttcgcaatatagtttaatatatttccgtatattacactgcccttttctcaactggataaggggattgatacttaaatacaatatcaatgctcttatctccgttcacaacaattttctcaatcaattctgtcacaatttctcgcgtcacttcggatagcgttccatatttaataaatttctctatccagttctcataggattcttctgcctctccaaagctgtctttttcctgttctgccatctggattttctctctgataactttatcctgcttttcatattctgctttataggaaagatattcttctttgtccagaacaccatccacataattctcatacgtcttctttttgtatttctgaactgctgcaagctctttttgcagttgttctatctgctgttccgcttctgcacatcgtctctgcacctcctttctgcggtctgctgcctttagtatttcatccttatcactttctttcagtgccagttccgcctgtctctggatttcatttattacaatgaaatccagtatctctttcttaataaaatgagaataacaaattgtgtttccctttttatggtaagttccacactcatagccatccctgcaggtaacacgctgaagattatatccacagtccccacagacaagaattcctgcgtacggattcacctttctcacttcactgtgaaagcccggtgttcttgttcttttcttcataatttcctgtacctgttcaaaagtatccttgctgataattgcttcatgcattccctcaacaatatattgttgttcctctggaatgtaatagtatttttccactttatatgatattttttctgacttatgctgtaccatagcacctgtataaactctgtttcgtaaaatcacattgatcgtaggatacgcccatccttttccgccggatttttccaaagcattcgtatagttcaatccctgaacctttcttttatactctgatggtgtcataataccttcctgattcagctttctcgcaataccatctctggaatatcccgccaaactcatataaaagattctccgaactaccttggcagcttcttcatcaataagaaaatgatgcttatctgccggatctttcatatagccatacggagcaaagcccgacataaactgcccacgttttttctgtgcagagagggctcccctgatcttcttggatatatcacgactgtacatatcattaaacagcgtcttaaactgtgccagttcttcattactgtgatgagcagaatccacgccatccagaattgcaatgtatcggactcccaacgatggaaaaacacgctctatgtaattacttgtctcaatatgctcacgtccaagacgggaaatatcttttgtaatcacaccctgtatttttcctttgtaaatatcttccatcatccgctgaaattccggtctgtttgcaaaataaagtccggaataaccatcatcaatataaatatcagcgatttccagatcatttgacttacctacatattctcgaatcaacttcatctgattctcaatactctcactgattttattctccccgtcatcctttgacagacgacaatatgcagccatctgatacatcacatcaccccatctttctgtattgttacatccactgaattattctccgaagcaaacttaaaataaatgtctatcttctgatccggataaacataaattttattaatcagttcttcaagtacttctctggtcaactgttttaccgtcagttttccccgactaaaattgttcagccatacctttgtcgtattcacagcagtctgctgtttctgttcttcctgcttcagcttttccagttctttctgatattgtcgattctcattttcatacatctgctttaattccagaaattcttccttggaaagaatttcatccatgagttgttcatatgcccgtttcctgtattctgtatttcgctctatttttgcctgcaaacgggtaattttactatctacttccggctttctttgcccaatctgagtttccagatttttcagatctgtgcgcatttgtttcaactgttgattgatagcaaacaccactaattcatccagtttttcaaacgtaatatgattcagttcacagtaattcttccccatcttttgatggaaaccgcacatatatccatcataaccattatgtgatgccagatatctcttacgcatagcggttttgcattttccacaaaacagtaatcctacatacttatgtggttccttatttctgtcaaaatacgaaattcgtcgttcctgtctgatctgctgaacttgatcaaattcttctttggaaacaattgcttcatgtgcatctggtaccaattccatttcttccaatggaattgcctttttatatttaagtttataagatggtctgttagattttctgattacaacggcaccggtatagatcggattcttcagaatcccacgcacagtagccggtgtccataatcctttacccacgtcccaggcataaccgttttttaaaacttcttttttatattttgccgggcagggaatctgatcctcatttaaaacccgacagattacactacagccaaatccatttcgatacatcttgtatattcttccaactacctctgcggcataaggatcaacttccagatgattatgaactgtctcgctctttatataaccaaacggtggttgtttcggtgtgtattcacccatgcttcttttcgtttggattgtagtttttatctttctggatgtatctcgcagatacatgtcattaaataaagttttaatttccagcagctcatcataagtactgaccattgaatcgtaattatccaaaagagaaactactcgaatccgtttctcaggaaaatatttgcccagataataattggtatcaatatgctctcttccaagtcgtgatacatccttgaaaatcaccatattgatcgtccccagttcaatatctgccagcattcttctgaattctgttctgtcaaaattgcttccggaaaatccatcatctgcataaactcttgcttctgtaatatcattctgttctgcaatataatcccttgccatctggatctgagagtgaatactgttgctgtattcaccctctttgttttgctcctcaatagaaacacggcaataaattcctgcctgatacattctattcttcccctcttttcatttgtcttacatagtcattgtctttcattgtctttatcttacaataggaatcatagaaaatcaacctgcaatttttcgttctgccagattctgaatgcattgtgataacgttttatcgccattaaagtggactcgaacctgatatcctgcatgttcgtagcttacagcttctttctggatttctttttctgcttccagattttctatattcccagaactaaaccgtgtattcatgctatatgcctccttcaacatacagacttctttacatcctatgccggcaggattgtacaaaagttctgtatgaattgaattcagctttcgaaagcctgattatattctaaattcttattgtataaaccacattgaattgaaattgacagcaaattgagtattttttagttgcgtttattcatattttgcaccaatgttctattgtccagaacttatgttcgtgttataattaaaaaaattcagtacaaccatcaaaaatttacgaaatacgaaaggggaattgcttttggatcgatgcgatttttcatctatcagcacctacttaaaaaatcatatcagcgaaagtaatcaaatgagtcagcctgattttttatacgaattatttgaagattttatggatgatccggcaaatcaggatttttctatggataatggtctggtttgtcgttggctgaccggtcaagcaaagatcagtcccaaaatatctgcctactattccaaacccagtaatcagaaaaaactggcagaaaccattcaccagaatctgcttccattgatgtctgactgcaatatggctatgcaggatatatacacattatttatacaagatgacaccatctccgatgccaaaaagaaaaatctggcttctctgtataaaccagccagctcacgtctgctttttcttgcaaagctgatttcttttggcatggagcgacaatttatcaaacgtgatactaaaaatcaaaaattaattgccggaggtgccctgtcacccattgtgctggattatattatggacagcgaggttccgaaaccatgccgtcattttatcggaagagataaagaactagaagaattatataccatgcttgaggaaaaccgtcatgtttttctttgcggaattgccggtattggtaaaagcgaacttgccaaagcctacgcaaaacattacaaaaagcattacactaacattctatatgtagaatatacaggtgatcttcatcaggacattactgacatggattttattgatgatccaccagaaatcagcgaacaggaacggtttcaaagacataaccgttttctgcgttccctgaaatccgatactctgcttatcatagataattttaatgtcacagctacacaggacagttttctgtcagtagtattaaaataccgctgtcagattttatttacgaccagaagtaatctgaatgaatactgtacttttcaattaaaagaaataaaggatataaacattcttttccaactgacatctgcattttattcagaagcagacaagtatcgttcgaccgtcgaaaaaatcatagagaccgtacactatcatacttttgctgtagaactggctgcaaaacttttggaaaatggaatttcaactccaggtcagttattagcaaaacttcaggaagaaagagcatctctcgataatgaagataaaattaagataatcaaggatggtcaaagcagtaaagccacttattatagtcatatccatactctattttcactatatgctttatcccgaaaacagcaggatatcatgtgcaatttgtgttttcttccttacactggtatttctgcccgcatattcgccaaatggctggaactgcctaccttaaatgaaattaacgacttgattgaaactggttttgtgcagacaactacacgtcacacaatctccctgcatcctatgattaaggaaattgccctttcagagacaaaaccatctgtaagtagctgtcacatattactggattctttacagaaaatatgtttaatgcatggaattgaagtcgattattacaagaagctgtttcagacagcaggaaacatcatagaattgattgaaaaagatgatataccaaaatatctactttttctggaaaatgtttttccatatatggataattataattaccagaaaggtatgaaagaaatcattcaggaattaaaaaattttttgaagcctaaagacattggcaccgattctgaccgggcattgttactggattttcaggctactcttgaaatcaagccagaaaaagcaataaaactggaaaaggatgcacttgcccagatagaaaatatcactgctgacaatgctcgccttgtttccaaccttcatgccaatctcggtggactttaccgcatgaacggtcatcccgatcttgcaactggtcataaggggcatgatgatttgacgtcatccccaccttcctccaggttatccctggcagtctctccagagtgcccaacactacttgctggctactgaagataggggttgcgctcgttgcgggacttaacccaacatctcacgacacgagctgacgacaaccatgaaaatcttatcatttctatttcttatatgcaattttcaaggtacatggtgatgtgtcattctttcgaactctgcatcttattcaattgactgaatttttatcagtcattagaaacctgaaagcttactttcaactctctaatcactggtaaaaccagctatcgcaacagcactgccttgctgatgaggttggcaccgataagttgttgctcatctcttgcctgtatctatatgaatctcccgaacatttgcagcggatctgcttcgtgttcttcaattttttatagcctggcggccacctactctcccgcaccgtctccagtgaagtaccatcggccgcttgagtcttaaccatcgtgttcgggatgggaacgggtgttaccctcaagcgcatcgccaccagaattcattattaagcttttgacagccttaataactaaacaatagataacaacccttacttttattccttagaaaggaggtgattcagggttgttgtctattgtttaattatcaaggttctttgtctttgctgtttgaaacagcttatttagattatcatattcgttgacgtttgtcaagaacttttttaatcttttttcgaccagcttttcagctgttcgaccgctatccttccgtcaaacattcgcatggatggagcagttacggagatcccgaatacgttccccatgtaatgcggtattattccggtggcagcctgttttctggtttgtttggaaatcagcagattgtctcggtagcaatggggcagatcgggaacagtggtggccagaagttctggagctggtatggatttgatagtcatgtagaatggtgtgcctgttttgtaagctggtgtgcagaccagagtggcctgatagcgagtgggaatgttccaaaattctccttgtgcagtgatggtgttacttggtttcagagaaagaacaaatggcaaagtggtggaacaaccccatcagccggaatgattattttcttcgactgggatcacgatggaacatcggaccatgtaggaatagtagaaaagtgtgaaggtggatatgctaccctcatataggacaatgaaatataaaagtcctatatgggggtattttcatgttcagaaagagtaagatagaaccagtagaaaaagtaaaaatagtcgaacgctaccttgcaggagaaattggcatacagcaagcaggaaaagaattgggagttgatcatcatagtattcgaaattggatttctatttatcagtatgatggaccaactggattactcaatcaaccgaaaaacaaatcttattcaaaagatttaaaaatatctgctataaatgattatcttaacggagaaggatctcttcaggatatttgcacaaaatacggaattcgttcacacagacagctttccgattggattaaggtgtataattctggtggaatattaaaaacatccactggaggtgcttacatgaaaaaggcaaagaacactacacttgatgagagattaaaaatagtaacagattgtcttgcaaatgataagaattatggtgcaatggcactcaaatatgattgttcctatcaacaagttcgcaattgggtaatacgatacgaaaagatgggtcaagcgggtctggaagacagacgtggacgtcgtatagcttctcttccaagcagaacacctgaagaagagctacgtgacaagatagctgaactggaaagaagaaatctagacttacaaatggagaatgatctgttaaaaaaagtcagagaactggaaaggaggggtcgctatctttaatccatcggttagccgaatatgaagccatccaaaaactatcgtctactaagcattatcccatagatagactttgtaaatatcttaatgttacacgttctgcgtattaccgctggggaaaatatccgaaaagtaataatgaacttcgaaacgaaagactatccactgaaatccaaaggattcatcaccagcatccagatatgggataccgaaggattcgtgatgaattagatggacataaaggaattcatgtgaatgataaacgagtacttcgtatttgtaggaaatacgatataaaatcaaatattaaatggaaacctaagagttgtaccagaggagacagaaatcctgatcacatagcaaaaaactatttacaccgtgaatttcacgccgaaaaaccgaatgaaaagtggcttacagatgtttctgaatttaaatactacaacggaatagaagttcataaagtttatctgagtgctattttagatttatatgatagaaggattgtttcctttaaaatcagcgatcataatgataatccattagttatggacacgtttgatgaggctgttcgtcaggagccagatgcacacccattagttcattctgatcgaggctttcaatatacaagcgcacagttttatactagattaaaaaaacatcatatgaagcagagtatgtctagagttgcccactgtattgacaatggaccaatggaagggttttggggaattctaaaacgagaaatgtattataaacagcgttttaatgacagaagctctttgattactgcgatagctaattacatagattactacaacaaccaacgacttcaaaggaaactgcatgtaatgacaccaatgaaatatcatgagcaatatacaaaagcagcataaaatatcgccagccatagcatggctgacgatacaaaaatttattattttttattgtcctcttgacggggcaaagaaatatgcagaacaatttcagatagaacatctgttaaagaaaaacccttatgaattatccggtggtgaaaagcaaagagttgccatatgtcgtgcgttaatcaataatccagatttaatccttgcagatgagccaactggaaatttggactcaaagtcaggaaaaattgtaattgatgcattgaataagatttcatcggaatataagaagacgattgtcatggtaacacatgatccgcagatggcaagttattgtgaccggattattctgttgaaggatggaaagannnnnnnnnnnnnnnnnnnnnnnnnnnnnnnnnnnnnnnnnnnnnnnnnnnnnnnnnnnnnnnnnnnnnnnnnnnnnnnnnnnnnnnnnnnnnnnnnnnnnnnnnnnagtaacagagaaacattttatcaaacaatcctttccaaaatggcggaattataaaaagaccaatgccagtatcagctatattggaattcaagattattgtaaggggtgggaaggtatatgctgcataaaataatttacaaaaattttaaaagcaatatacggaaatatattttattttttgtcagtaacattatagccgtagtagaattatttatcttttggggattgaatgatgttgtagtgcgggcagttacagaaccttcgattatgatgggaataaaaagtgattttgtgatagcggttggattaataactgttgttacaatacttttgatggtattttctatgcgctattatattaaactccgggcaaaagattatggaacttttattatgcttgggatgaaaaagaagatgtcttatatgcttctttttgcggaatatattataggatgtataggttcacttttaattggtattttgtcaggaaatctgctcctatatggaattttatattgcttaaatcaatacaatcctcagattattacattacaaaaagtggatccggtcgtatataaaaatacaattcttttgtgtctgggagttatgcttggaatctttataatcctcctggtgtggatggacggaagaaatttaagctctttaatgatgaaagaggaaataaaagaaaaacgtcccgtcagttcaaaatggctgttgtttacagtgttagggattgtatttataatacttgcaattaaacaatataagccaggaacatggggatattattttgcacatatatattttctaataggcggaattcttattatcactttcagtggtgcatttattcttgaacaggcgaaaaaagaacctttttactttcggtatgcattgaaaatcaatcaacttgatagtaaatatcaaagtaatatattaattattctgatgttatttgtaatacatttttttgctctttcttatatcggtacacaaatagtagagattctgcctcttgacaagacaaatagtaattatccttatgatataatctggatggcacgccagaacgatgaaaaatacagtgaaaaaatagccgaaaaatataatgggacagttaaacatattccgatgatccgggcaacaatgttttattcacaggaagaaattggaatatccgaatccacatataaagaactaacagggaaggcttatggtttgtctgggaaagaaattgttataggaattgaggaccagaattatcaaagggaagaaaaagtaactgataaggttctttatgatttatttggatggctgtatattggtaaatttaatccgaataaaaaggaatttgaatcttccaatattttaaaagatgcgaattatcagtataggataaaagaaattcatacacaaaacgtatttggaaaattcgtaccagaagatgccggtgaaggttgtgaagatacagttatattttcggatgaatattttgataaacaatgggaaaaacaggtagcagatgatgaagaagtttcaatgttagaagcattttcttttccaaaaacaaaagagcagatggcctggaaagagataaaatgtcatgcagataaagagggaattactgtatttcaaccagatgacagtcattcgccacatgctatatgctatgataagactgtgtttttaaaagagcagaaagcaagtaatatatttttactttttagcaagctgtttattctgataacacttttgattagttgtgcttttattatggttgttaaaaatctggccgaaatgtcttcttatcaaagacgttatgaattttttcattctatgggcatgaaacaaaaagagcaaaagaagatcttaagttttgagatttgcagcgtagcaaatatagcattaggtacaggtatttgtttagctcttttatatgtaatgacttatttacattggtatgatgcgatgggtgaaaaaatatcaaccactttttggatctactggcttaagctcgttggaatttatataattattcagatagttgtgcagaaattatttgtaaggtatgtgaacaaaagaatttagaagaaaggctcagacgaggtttgttgtgtcaaattttgaatgcgatataaaaatacgcatataatattttactgacaaatgtttgcaaaaatcacttgccttttgcaaaggttcgtgataaaatttttgtcagtgatcaggttgcagaaacttgcgatgcctgcgaccggacggaggacctgagggccctccgtttttctatatatgcagatttttatagaaggtgaaaaatgacagaaaaagcgttaaaaccgataaaaccgtttttgaattatgaagaacaaatcaataatctcatcgagcaaaaaggaatgattgttaatgatcataaatttgctgtgtccaaattagaagatatcagttattttgctttaatagatggatataaaaatctgttttataatcctatgacaagaaaatataaggaaggcacaacctttgaggatcttgttgctttatatgaatttgatgaaaaacttcgtacattgatcttccggtatctttgtcattttgagcaaaaaatgagatcgctgatttcttatcatttttgtgatacttattcagaaaaacaggaagattatctgaatgctgtacattataataactcgggagcaaataaaaagaaaattgctgctttaatagctatactggatagagaagcaaagaaaagcacagatcacgcttatgtagtttatcaaagaaaaacatatggaaatgttcctatgtgggtcattatgaaaactttaacatttggacagatgtcaaagatgtattcatttctgacgaccagtatgaaaacgaaaattagccgacattttgattatgtaagtgaaaaagaactaattcagtacatgaaagtgcttaccttatatagaaacgtctgtgctcataatgaaaggttattttcatataagagcaggtttgatatccctgatacaatattacatagaaaaatgaaacttccgcaaaatggaaataaatacaaatgtggaaaaaacgatttgttttctgttgtgattgcttttcgaatgttgctggcaaaagaagattttgctgaatttaaaaaatctttgaatcagataattaaccagtatatgaaaaagacgggcaatctaaaccaggatttatttttcaaagcaatgggattcccggaaaactggaagaatataagtagatataaattataaaataatcaatatagtacgaaccgaggattcaaaatgaaaaccacggaaaacagataaatatataaatagtcaggaaggtcaatattttgatttgcctgacttattttttttatatccaaatatgtaagaaaagttgccgatggaaagttctttgcattttatttgtaacatttatcaaattgaatagttaatattataaaggaaaggaggacagcacatggattttgattgtatatataaatcatattacctggacgtatatcattttttgtgtggtttatcatcgaacaaagaaattgcagaagatattacacaggaaacttttacaaaagcattgacggcaattaattcatatgatggaagaaaagatatacgtgcatggttatttacaattgcaagaaatacatattttacatattgtaagcgtgagaaaatctatgtggaatgggagcctccaacggagcaggtcgatattcagacggagtttattgacaatctaataaataaagaacaggttgagaaaatacataattttttgaaaaatatgaaagatccatacaaaatagtatttgaattaagaatacatggggaactttcatttgaaaagattggaagaatttttggaaaaagttctggctgggcaagagtaacttattatagagccaaaatgaaaatattagaatatatggaggcagagaataatgaataaaataacatgtaatgtaattaaagatattcttccgctttatatagatggggtggtaagtgaagatacacaaaaaatagtggatgaacatttagcggagtgcagtttatgcagggatgaaatgaataaattaaaaaaaacgttagttattccaacaaatgaagaaatacaacaggagactgtcaatgtattggaaaaaagtatttcttctattgaaagaactgtagttaaaaaatttatccattattcatcgtatttcgatctgatatttaatatcggaatgattccgtttatatattggctgtatgtgatttggataaaaaaagaaacgtctcttttgaatatatatgtgtttatcaaaaaatatagccgaataagcggggacttattaagctttgctttgttttttgtaatatttatttgttgcgatattatccatattgttttaaccatgaaaaagaaacaattgaatattatggattcggtagttgtgatgtcaattatggtaaagttatttcttattcttattctaatggcatttttaacggcaggtatattaatgtaagggggagaattcatgttcaaagttatatggaaaagctttaagtataataggaaaaattttctttctttttttatgagtgaaatattatcagttgcagttatatttatgcttatttatattcaagaggcattgtcacaagttccaggaataaaaactgaagcgttacaatttgcatatcaaagtgaattaagaaagcagttacgcataatcattccatgtattattttaattatgattctggtaacgggatattctgttaaagcgtatataaacacaagaatatgggattataaattatttcaattattaggaatacgcaagaaaaatttaaaagtaatgattggtctggaatatgtaataagcggtatgcttgcatgtggttttggaattctgtttggtttaattggaacgaaaattataaaagaaattcttcatactagaataaatgcaagatttgtcaaaggcatttcgatgtcaagagtttatcttgtgttgattctaagctgtctgatcatgacgataggcgtatatattacattgcaaatattattagataccagaacgaatttaggagataagatattcaagattaaggaatctcgaatccattcgatgatatcagttatttactttatagtgggtattttggttattagtagtggttatctgttggtgaataatgatccaatgatggcttatatggcacttatatgtattttgacaggtcttataattcttatgatattcggaactggattttttatggaaaaattcagtgagtcgaaatattataaaaagcatatattagcttggaatgattgctactgttacataaaaaaacatggatttcggatgctaatacagatattgttgggaatcattttaatatttaatacatttttaatgcttcgaggtacaattcatgacagatatatgccaaatgattttgtgtgtatcggcaactcaaaagaaacgacagcagtaaatactgtggtaacagctcgatttaatggtcttacaaaacaattcccgtttctgtggtttaatgagatgagaggtgattcctgggttgctatatcacttagcgactataataaaatttacaataaaaatgaatcgttaaataaaaatgaaataataagaatttggagaaaagaagggagccgtaaatcggatctaagtgataaacaacatagaaaaataaaatcaatcgcacttggtaaatgcggaaatatggatgaagagggattggaatataaatacaatttccagataaagaaagagcaaatcaaagagatgatcggcttttctatgaccggtcttgtaattattccagataatatattcacgcaggcagaaaaagaaagtgattataaaaaaatgtttatgattataaatctgccaaaaaagaacctgacagtttcaacacgatacatagaagaaaaattgcaacaaggaaaactagatgaggctttttgtaagttgacaattcagggtattgataaaaaagaaaacgtattaaatcaaatggtagcaatcctcgtagcgattattattttaatttttacgatgtttataacatggttaatgctgcagaatgatcaggagcatttaaaacgaaaatatcagataggtgctattcttggtgtgaagaggaaggaagggtatttatccgttgtgaaagaaatatccagagacatgtggtggtcccttttacttgcgatcggtataagtggaatgttttgcggcgtatttataaaatcttattattacggaacaacggaaattgttttgatacaaaaggaagttgcaatgttaggatgcattttatgcatatatgtaattatttttatgatatttattattttttcaaccaggcgtttatggaaagaaatttcaaaaatatggggtgataagaattgatgagaaatatattagaagttaaaaatcttgtaagaagttacaatacagcaacttttagggattcaaaaaataatgtgaatgtgttaaaaggaatcagctttcaagttcatacaagaaatatttctttcatcctacctatcaccttgcttggtcatgccctcgaccgattagtatcagtcagctccatgtgttaccacacttccacctctgacctatctacctcgtcgtcttcaaggggtcttactacttacgtagggatatctcatcttgaggggggattggtagaggagcattgtatacgggacgaagcagtaccgataaggagctgtggactgtatagaagagagaatgccggaatgagtagcgagaggaaggtgagaatccttccggccgaatatctaaggtttccagagtaaagctgatctgctctgggtaagtcggggcctaaggccaggtcgaaagacgtaaccgatggacaacaggttgaaattcctgtaccttaagtaaacagaactgtggggacacgtgtggagagcacaagccggaaatggaaaagccggtgcaagcgaggtaggagtattgggatgcgtactgctgtatcaccgaagtataagccagcacctcagcacttagggattcggaactttccgaactactgctgaaggctgctcctgcaatgattcccgcaatcaaaatgaataccagaagaaatgcaccgcctccggcagcaatccattttcccattttttcaagagctactacccctttttgaatcgctgctgtaattccctgtacggataactttgaacattctggagagatgtattcctgtccgtatcaataaccggaatattcgtcaggacaatgcaacagctaatttaaaacaggcgaaaaaaatcctgttgaacaatcatgctccaaaccagaattgactcaaaaaagtataacacaatgattacttttcactgacagtggtactactttctttcctcatttattaccggaaatatgtcactgtcagttatctaaaaccatagtaccaaaccaaaagattttaaaaccaaaactgcccggatacgggcataaaaaggaggtgccagatatggcagataaatcacctcctttctaaggaataaaagtaagggctgttatctattgcttagttattaaggctgtcaaaagcttaataatgatttttggtggcgatgcgcttaggggtaacacctgttcccatcccgaacacgatggttaagacctaagcggccgatggtacttcactggagacggtgcggccatcagaaccttaaacaatgtttaaaactctgatcactggtaaaaaccagttttatcttatgtactatttctcttttttcagatttggcggccacctactcttccgcaccgtctccagtgaagtaccatcggccgcttaggtcttaaccatcgtgttcgggatgggaacaggtgttacccctacttggaagtatcgtacatataagggcaaaaagcaacgaaaactatggtcaattacttatgaaaaatggctgactgattggttaccagcataatattatataattattttacattatatcgattaaaaagtaggattaatccacattttctttaaggttaatcctacttttgttttactaatgaatatttctcttgcaagatcgggatgaccgttcatgcggtaaagtccaccgagattggcatgaaggttggaaacaaggcgagcattgtcaacagtgatagtttctatctgggcaagtgcatctttttccagttttattgctttttcaggtttagtttcaagagttgcctgaaaatccagtaataatgcccggtcggagtcggtgccaatactttttgtttttaatagacatttcaattcctgaatgattccattcatacctttgtggtagttatagttatccatgtatggaaatgcattttccagaaaaagcagatactttggtatatcatccttttcaatcaattctatgatatttccgattgtttgaaacagtttcttgtaataatcaacttccattccatgcattaaacatatgtgctgtaaagaatccagtaatatgtggcagcgagttacagatggttttgtctctgaaagggtgatttcctgaatcatcggatgcagagagatagtgcgacgtgttgttgtctgaacgaaaccagtctcaattaaatcgttgatttcatttagtgtgggcagttccagccatttggcaaatatacgggcagaaataccggtggaaggaagaaagcacatattacacatgatatcctgctgttcaagagataaagtgtataaagaaaacagcgtatggatatgactgtaataggtggctttcatccaagaattctggctgtcttaagttatatttctccatttccatccggattgttggaattcccgaatacctgttttctattattcccaatgtttcaagtgccgatgcaagtaccggatttcttgtatccggttgaatttttcctaattggtcaatagtgtgtatcagtcaggcaggatgcagcagcccacaggatatggacaagttaaaacttgcatggcagggatataactatggaaacggatacataggatgggcattgcaaagaggcggatacacagaagccaatgctttacaattttcacaggagcaggcagcttctcattattaagcttttgacagccttaataactaagcaatagataacagcccttacttttattccttagaaaggaggtgatccagccgcaccttccgatacggctaccttgttacgacttcaccccagttatcggtcccaccttcggcagctccctccttacggttgggtcactgacttcgggcgttactgactcccatggtgtgacgggcggtgtgtacaagacccgggaacgtattcaccgcagcattctgatctgcgattactagcgattccagcttcatgtagtcgagttgcagactacaatccgaactgagacgttatttttgagatttgcttaccctcgcgagttcgcttctctttgtttacgccattgtagcacgtgtgtagccctggtcataaggggcatgatgatttgacgtcatccccaccttcctccaggttatccctggcagtctctccagagtgcccacatggttgtcgtcagctcgtgtcgtgagatgttgggttaagtcccgcaacgagcgcaacccctatcttcagtagccagcaggttaagctgggcactctggagagactgccagggataacctggaggaaggtggggatgacgtcaaatcatcatgccccttatgaccagccttaagtaaacagaactgtggggacacgtgtggagagcacaagccggaaatggaaaagccggtgcaagcgaggtaggagatgaataggcaaatccgttcatcaatccgaagacgtgatgcggaccgaattaagagtagggaagtgtgtgagccatgcgtcaagaaaagccgctattgttttggtagtgtaaattattctgtgtaaacctctcagattgatgataaaatcgtaggtttatagaatactaaaatataatgtgatgggctgaatggcatctcttgctgttcagcccgttgtctatttagtagcatggattctattgcatgtcaagggcacccgataaaatcgggtgtttatttacccttgatatgtgattggatctatacttagtcgatatccatcggctggaaaatcttatcatttctatttcttatatgcaattttcaaggtacatggtgatgtatcactctttcaagctttacatctattcattttgactgaagtttatcagccatcagaaccttaaacaatgtttaaaactctgatcactggtaaaaaccagttttatcttatgtactatttctcttttttagttttaggactataaccattacggctatcgtctgtctctttgttcttgtagtcatacttggaatatccaaggtgatcatccatttcagcttctaacataccttgcagcgtttcgcctaacaggtctttcagcatgtcctggatatcctgagcatcctttgaataaaacgtccaatgataattattatctgctgacgttggcagccattgcagaagaaatcaagcatcggaaagcggaacggaagacagaggtaattctggctgtcggacttccgctttcaagttttggaagagagaaaccgggattcagggagtatctgttgcggaaagagcagccagtgcgatttttatatgaaagtgagttatatgagataacaataaaaagcgcttcgctcgacttgcatgtgttaagcacgccgccagcgttcatcctgagccaggatcaaactctcgttaaaaatctttaattccgatttgactcggacttaaaatcaagttcgttccagttcaagaaaactactagctttcttatcccctttactgttttaaggttcgacattaaatgtctgttctcgaaagtttggcgaaaggatagcggtcgaacagctgaaaagctggtcgaaaaaagattaaaaaagttcttgacaaacgtcgatgaatatgataatctaaataagctgtttcaaacagcaaagacaaagaactttgataattaaacaatagacaacaaccctgaaaattctaaagagaattattcagaacagacatttaatgtcgaaccttaaagcttatcacgtctttcatcggctcttagtgccaaggcatccaccatacgctctttctagcatgaccaacttgctttcattcacgggaatgaatgatcgctacaccgatatagcgttatcggcgttggcttaaggtcaattttatttaagtctgttttcttcagacagtaattattacttgtatcctgtcggggcagtaacttcttttacatacacagttttcagtgctgaatcaaaataatcgctgactgcttttccgtctgttccggttgctgacattgtcataagcaggttttcacacttcttatcagtataaataccataaactgccccagacagtgggttctgtgtattgatatctttcttcgtcaactcaatacgtgtcatattcagccactgtacgctgaagcttaccggagctgctgtttcgctttcaaatacaccgatatcctgtttggaatctccggtcgtcagcaccagcgttctccatgtctttccgacagaaccatataagctgccggaagcataactgccaccgtgagcagatatattttattcttttcactgatgagttttttaagctgcttttatttcggaatacaatttatcagtacaataaatgccgaaaaagcagaaagtttatatccgtatgattttatgtgtgttgcagataaatcagacgataagctttttgaaaaaataaaagaaaagtatcatgctacattaactgaatatccgatggtaagagttgcaaacgcagataagacggaacatttagagggacgaggggaaattattatccagggacaacagattggtatctctgaatctacttattacaagttaaaaaaagctgtagatccatcgtataaaaagaaatccttaaatctggataaaaatggaaagaaagtatatgttgtccatcaacaggaccgggcaacaaaggctcagccggtcgactggtactataacaaaaagacaccgactttacatatcggactcccttgtgaatattgtgattatgctgatcatgagacaacatacgataagaaaatagttgccggagaggagatctccagtcttacagggtgttacagtacaccaaaatgtgaaaatctgatcgttttttccgatgaatatttcaaaaaagctcaaaatgaatggaaggatatagaagctttgactggttttaaattggaacggtataaggcaatgtatggtgatgatggagaaccttatattattgaaggaccaacaaaactggtattcatccagacagataaaaagtacatagatcaaatcgataaagaattggagtcaaaagaagagagacataaatatatcggcaattatgattctacggtaaaatttcattatttatcaaaaacagcaattacggatatgaaaaccgaaagagccgttaagtcaatgatctgtgtatatattatcattacattaagcatattgaattggatcatgctatatgccatgaacgaaatggagaaaaaagaaaaagcagaacgtgagaaattcctggtatccatgggaatggaccgaaaagaacggaagaaaatgaataaaagagaatggtacatatattggattgtcccgacaattattcttatcatttcaaccatattatttatgcgaaataccatgactgcgagaatgtatccagatgatatccggaaaatctgtgaattacaggaagcagtggttatagcagtgtggatcgtaataaatggaatatatttttggattatgaatcgaaaggcaagaagggggtagaaaatcatgacaaataatacagaaatactgcggacagaagggttaaagagatcatatcttgttaatgaaacgaaaatagatgtattaaaaggaatcaatctgaccattaataatcaggaattcatagccattatgggaaaatctggatcagggaaaacaacactcttaaaattattaggactgctggaccggccgacggaaggaaaagtcttttttaaaggtgaagacagtaattcgttaagaggggacaggcttgccatgatcagacgccgtgaaattggattcatatatcaggattactatcttatggacagtttatcggtaagagaaaatatcatgctgccgaagattctggatcacagtccagtagaagagagtataacggaagcagaaaaactggccgatattatgggcgttcgagctttgctggataaaaagatctttgaattatcaggaggcgaaaaacaaagggcagcgatctgccgggcgttgatgaatcattcagatctgatccttgccgatgaaccgaccggaaatctggattctgcttcatcagaaacagtaatggaatacctgcagatgatcaataaagatttgaaaaaggctgttgttttggtaacgcatgatgcatatgttgcaagcttttgtgacagggtgatctttgtaaaggatgggaatattgaagttgaattaaggaaaaaagaaaaacaggatgttttctgcgataagattatgaaagcacaaaaagatatcttgaaaaacaaatgaatgatataggaaagacaatcatcatggtcacacatgatctgcagatggcaagctattgtagccggttgattctattgaaagatggagtgatattggaggatttaaagaatagtggggatcaggaggcgttttatcaggagattctcagaaagatgaaagagctgtaaaagattcacaaaaaattgacattgctgacttgaaaaagtaaattccatcatgttttaaattttgccgaaattacgagagattttctttttgaccaaattagttttaggactataaccattacggctatcgtctgtctctttgttcttgtagtcatacttggaatatccaaggtgatcatacatttcagcttctaacataccttgcaacgtttcgcctaacaggtctttcagcatgtcctggatatcctgagcatcctttgaaaagtttcgtaatacagaaacatatatattgattctaaagagtttaaattttataatgtttcgtaataaggaattatttctaacaagaagaggtaaaagtataatggatgtggagatggaaaagagaaaatttttaaatctatgtggcaaaagagatcgagcattattgtcaggtaaaaaaagaatgacattgggggatatggaacgattgacatatctgacagaattttttgaactggagaactacggaatcgccttatggaagtaataattactgtctgaagaaaacagacttaaataaaattgaccttaagccaacgccgataacgctatatcggtgtagcttttcatccattcccgtggatgaaagcaagttggtcatgctagaaagagcgtatggtggatgccttggcactaagagccgatgaaagacgtgataagctccagaaaacaggctgccaccggaataataccgcattacatggggaacgtattcgggatctccgtaactgctccatccatgagaagctgcctgctcctgtgaaaattgtaaagcattggcttctgtgtatccgcctctttgcagtgcccatcctatgtatccttccggctacacaacggttacaatccatctattgaattcattatcattggccaatcacgacatgagaaagacttggtattatgtttgatgcgtattttggcgcgatgtgtagaagttcttaggcagtttgacttcccgttaaagggacggagcgaactgttcatccaagaattctggctgtcttaagttatatttctccatttccatccggattgttggaattcccgaatacctgttttctgttattcccaatgtttcaagtgccgatgctagtaccggatttcttgtatccggttgaatttttcctaattggtcaatagtgggtactgtctgcggctgaaagagccacaagcagcggttcaacagtcacactgacaaaaggaagaacgatctattatccaagttatcttggaaattatcttacttgtctgtttacagtcaatggaaagatcgcatactgtctccagtcccagaaagcatccccaccgagtggaagttatgtggcacaggtattggacagtaacaagaatctgcagaaagtcctttactatggctatggcggggcaggagatctgacaggaagttatctgtccgggaaatcagaggatgaaaagtatgtgtatacgcatattgcagccagctacgcttacgcaggagaagccggatttaccggatgtaattataatgaccttgtaaatgcagggattatcgcatatatcaattatctgttcggacaggaagaaccgccaaaaggtgaactgagcttttcaagcacaaagctgaatgcagtacgggatggaaacatccagaaaacaccaaatatcacactgtctggagatcacagaaactatgtgacattgagtgtaccggaaaatgtgactgcacataatctttctaaaggaacaagtgttacaaatggaaaaatccagatttatggtggagatacattctatctgtctgcggatttattactgacaggcagttatgcttccggcagcttatatggttctgtcggaaagacatggagaacgctggtgctgacgaccggagattccaattggataatagatcgttcttccttttgtcagtgtgactgttgaaccgctgcttgtggctctttcagccgcagacagtaccgtgacatttccttcttcaatatcctctttcagttctttgactgcctgtgcagatgcatcttccccggatgcctcgatttctacatctgtgtagttctgcacaggcgaatccgaatcatcttcagattctgtatctgacttctgtttctctccaccattttcttcggaatgtgcctgaccttctgtatccgtcagagtcactttccgggtgatggtatagctgtcactcttatcttttggaacgaccatgtaagaggcaatgtaagttccggctttgtccggatggtattccccaccattttcatcttggatgctgataagcgtaacatcctctttttctgcatcataatggagtccttccatactggtttccactgcaaatgtttcatccgaaaccgcttttgtgatatcatctgctgtaaccgttgtatctttctggcttgttactacctgttcggatgcctgtacctcctgccccacatccgtctgctcggcagcgaacgcattggcactgctcaaggtactgatgcccatcaggacagccagtccaaaagcagcaattctggtctttaattttctaaccttcatgtgcttttccttcctaattataaatagatttttttaattaaataccgcagaagatgtttcctctgcggtacgttttatcttgtatatcgatttttttcttttttcacttcctgtctggtacgcttcaccgcttccatgacagactctgttggaatctggttatccttatatccttccagaattccatccagataaaacttcgatggtcttgccggaacatctttgtgcggagcgttcataatatatacaaacacttctttctccacaccatcctgattttttacccgaatcgattctttcccataaaaacttgggaatccttcataaaaatccagactcttctcacacgcttctgtgattttccataagactccttcgacacagcttcccttttccggcagtaccgttgctaccccattacccggagcccttcctcgaaatgccagtcgatagtcttcaagccggacattttccacaacttccgcagccggacacctgtacttcatctgctccagattcatgttgctgccataagcgaagtaatatctatcttccactctttctcacctctatctgactccttctgtcctttgatttttcttcagacactcatacgtgcttttatcatatctccacgcaagatcaccatccagatttgccagcagatgttttcgaacatttttatattcatctccaattaacccaagtctcaataaaaatgtacgaaatgtaaatgccggattttctgatatcagtgtctttttcatctgtgtagatctctgattgatcgcctgtgcggaaatggctaatgccaatgtaatgtttgctcttacctttcctgcatgtagtgtgctttcaaaacaacgccattccaaagttcccttggaaaacacagcatgaagattcagagcataataacgggtatcatcataatggatatgacttctatccctgcctccataccagacatttcttactcggtccatagtgattgacctatttggtatttttcggattttctccaatacctccggttgcactctctgacaataactatttgctcttctctcctgcactttcagtgctttgaacaggatatcttcctttgcatacataattgtcagtgcatttttcaggctttgcggtgtatgattcgatgcatctacatgaacatgctgaccacaggactcatttacaaaacctccatgctgtcgcagacagcgtactacttcctgtaactttcccatttcatcataggataatttcggagataccatttctgttgaatattctccacttgcatctacaattcgaccgtatactttccgttgtgtataaatgcttccatcagacataaatttccacttttttccttccgaatctatcactgaccagattccgtaagtagtgccgtcataatatgcttctgttccaaacatttcagcaacaacttctgcagcatgttgtctggtaatccctgtcatttcnnnnnnnnnncgtgccgtcataatatgcttctgttccaaacatttcagcaacaacttctgcagcacgttgtctggtaatccctgtcatttcgatttctgtgccaaagtattggtcttttataccgatcatgcctaatggattcctttctcagacacttcttgtgcgttgagttcggagtctgccttttgtaataatctgccaattgcctcgataacattgacagttaccccgtttccagcctgtttataaagctgtgcatcagaagtgctgtctataatcttatcaatctgccaatcgtaataaccctgcagacgcaaacattccctcggaactaaccttcttattctgccgtgatacaagatgccatgacgatcnnnnnnnnnngtcagaagtgctgtctatgatcttatcaatctgccagtcgtaataaccctgcagacgcaaacattccctcggaactaaccttcttattctgccgtgatacaagatgccatgacgatcggttgcagtaattgtaaacatcggttcttctggttctttcatacgtctgccgttctgacggacattttctttggctggtgtaaggactgctcttgccccttcttcacttaatacgccggaacattctcctttgtatttgtggattccgcattgtcgagtattaaggcttctgcattcttcagttaccagtggtggcggagacaaatctacaaaatgaagtgttccctgttggatacctgtagtcagggtgtgtgctatctgatgtccgactcttcctctcctgctgttgagattcgcatagcctaaatcgatgctgtccccctctcttgcaagtttgtagccgagctttgtattttctttaattggaacacccacatcatataatcctgtctttccacccattcctccggcttgtgatgtcagggtacagcttaatccttttggactgtagactctttttccctgacttcctgcccggatttgaacaagagctgctccatttgtttctggttcaggtaatacttttccggcacatcggaaatcaagatatccgacaatatacacccgctttcttgcttgagggactccgaaatccttgctgttaagcactttccattcgacatggtaccccagttcagaaagcgtactgaggatggtgcannnnnnnnnnnnnnnnnnnnnnnnnnnnnnnnnnnnnnnnnnnnnnnnnnnnnnnnnnnnnnnnnnnnnnnnnnnnnnnnnnnnnnnnnnnnnnnnnnnnnnnnnnnnnnnnnnnnnnnnnnnnnnnnnnnnnnnnnnnnnnnnnnnnnnnnnnnnnnnnntaatccgggcaatttcaaaaaagagagttcctcttgcgtcagcaaatccttctcgctttccggcgatagagaatgcctggcaaggaaatcctgcacagagtaaatcaaaatctggcattcgttctggttcaattgttcttgcatcactacaataccactccccttctgtgtcaaacagcaatcggtagttcttatccgcataagtatccacctcgcaatgtccgacacagacaaagtttcctgcccgtcttaagccttcacggaatcccccgattccgctaaagagatcaaaaaattgaatggttgcggctatcaacctcctttttgctgataaaaacaggcggcatgatttctcataccgcccttcgttattctgtatcaattggttaccattctgttggttcttctgctttggtttcttcttccagatcagtttctctttctggttcagtttcctcttccggttcgctttccccttctggttcgttttcctcttttggttcgctctctccttccggttcgctttctccttccggttcgctttctccttctggttcgctttctccttctggttcgctctctccgtctggttcgctttccccttctggctcagttctttcttccggttgagtttcttctgttcccaattctccggttgtctgttcggattcttcaggctgatctttgctttgccattcggcctctgccttttccagtgcttcttctatgatttgaattaagaaggctttctgtttcatgtgtttctgtccgatgactacttttaatctctggaataattcctctgatacctgtactgctactgttcttactgctcccatgcttatttctccttttccttccagtctgttgaaatgttcttcaatgacctgttgtaaaaatttttgtgtgctgctttctgtgagttcaatctcttctcttactttttcatgtaagtccatcgggatctttccgcagatatttttcatctctgccataacttttctcctttctctttcgctacacacaacatactccaaagccgcatggaaagctattcacaatacccaccaaagataacgatacatttctgtccttacccctagcagatccaacaatgtatgtatcgtgcaatcataggcctcaccccctttacaaattttccatttgagataaaaaatccatcatctgatctggtatttcttccgatgatggtttcattgtcgattgttccgtagtgccacatattcctaattcccgaacactttcttttatcgtcttttgaatgacttcttccagccatttccgatcctctttttccagaattgcctgaaccagatactggcttttctgcccttctggaaccctttgaaatttctcccatgccctctggtgttctggatttttcaggttcgggcggaacgaatataccggacgtgtcatctcgcccacatctgctctacaatccgttcataccctgttgcgttggcatggacgtcctctataaaaacagggcggcaaatcgcgtcctgtgcggtcacgtggcgttttaaaattgcggagcctccacccataaatacggttggtactgcccttatctgccatatctggcacctcctttttatgcccgtatccgggcagtattggttttaaaatcttatggtttggtactatagtttcggataactgacagtggcatgtttctggtgataaataaggaaagaaagtagtaccactgtcagtgaagaataattatcgtgttatgcttctttgcttcagttctggttcggagcatgattgtttaacagaattctttttgcctgttttaaattagctgttgcattgtcctgacgaatattccggttattgatacggacaggaatacatctctccagaatgcagtcatttctaactgttatccccctgtatgaggcaggttacccacgcgttactcacccgtccgccgctcagtcacaaaggaaatcatccgaagaatctttccaaagcgcttcgctcgacttgcatgtgttaagcacgccgccagcgttcatcctgagccaggatcaaactctcgttaaagccggagtgacctacaggaagataaaggaaagaaaaagcagacaggaagaagcaatggtgcagggggcagaaagcggaaaaaaattaatcaagctgaaaccggagcaggcggcacttgccaaggagaatggtaaacggcaggtgaaagcagcaccgagagtggtaaaagtatccggtctgtctcaggagaaaataaagacacaggcatccatgcagaaacagcataggtatcgcagtcctgatattccttgtgttaaagacaaaaatccaggcatttcttgccttgatcatcagtacagttgtagttggcgtgattggcggcatgccacttacaaacattacaatcgaagtagacggtgttgagaagacatttggtattgtaaattcgatcacttccgggtttggcggaaccttaggaagtatcggaatcattatcggatttggtgttatgatgggccagatctttgaagtaacaggtgcagccaagagaatggcacatacattcttaaaactgttcggtaagaagagagaagaggaagctcttgcactgacaggattcctggtatctatcccgatcttctgtgattccggattcgttgtactggcaccgatcgcaaaggcaatctccaaagcaacgaagaaatccgtgatcggacttggaacagccctggcagcaggacttgtaatcacccactccttagtaccaccgacaccgggaccgttaggtgtctgcggaatcttcggagtagacgtaggaaaattcatcttactgacactggtacttgcacttccgatggcaattgcatgtatcgcatactcaagattattcctttctaagaaatattacagaatcccgaacgacgaaggcgagatcgtagagatgccttatcaggagcctaactacgaggcagcatttgcaatggatatgacaggagttccgggagcactggaatccttcatgccgctgatcatcccgatcatcctgatcctgatcaacacagtagcaacagcaatgggaaagacagaaggattcatgaatatccttgtattccttggacagccgatcgtagcagtcggactcggactgatcgtggcaatcctgacactgggaagaagccttgacagacatgaagcccttgcagagatggaaaaaggaatggcatcagccggaatcatcatgttagtaacaggtggcggcggagcgctcggccagatcatcaaagactccggacttggaacatttatggcagaagggcttgcaaagacagcaatcccgatcattatcctgccgcttctgatcgcgacagcaatgagattcattcagggatcaggaactgtagcaatgacgacagcagcaagtatcacagcaccgatcatcgcagcatcaggcgtaagcccgatccttggagcagtggcatgctgcgtaggatctttattcttcggatacttcaacgacagttatttctgggtagtaaacagaaccttaggtgtcagcgaggcgaaagatcagttaacgatctggtctgtaacatcaacggtagcatgggctgtcggtgtggttgaagtgttgatacttaatatatttatgtaagcctgttttaaattagctgttgcattgtcctgacgaatattccggttattgatacggacaggaatacatctctccagaatacggtcataaattcgtttgtgtgcgatatcagcggcgttattcagctctgataaagtgagattggtcgttatgatcaggggctttttacttcggtaacgactgtcgatcacattgaatacctgttccagtgcaaagtcagagttccgctcaattccgagatcatcaataatcagaagactgtagcggtttaagctgttgatgaactggtttctgtcttcaaaatgcattccggtaagggtatttagaat
